United States Patent Application Publication US 2025/0051766 A1 - sequence listing, part 4

SEQ ID NO: 5065 - DNA, 58617616 bp, Homo sapiens (residues 4,342,047-6,513,069 of 58,617,616)
  source 1..58617616: mol_type = genomic DNA
aaaaaaaagaaaaaagaaaagaaaagaaaacaaaataataatatgggagggaggtggtaataggtgcattttagaaagagccctctggggcaatggtggaagaccgacagggtggggcatgagtttggaggcctgagactcactgcgatggccaggatttgggtgcaagaggctggaggtgtggctcagggttttggaaggcaggggacggaaaaaaagccaaagagaaagtgcgtaaggagttggggaaataaactgaggccggtttgggctatgctgagtctgcaggccttggggatgcccgttgttggctggacagtcagggtggggcccctaaagggtgcctgggctggacaacaatagttcacatgtacccagctcttgctctatgtcaagtcttcttcctgagaacattcccgagcaccctggagagcctcccccgcacccctactgtccagttcccacttcccgactgcggtctgggcaaagccacccgcacttgagcccatcccacggcgtcccggagctttaggaagtccccatcccggactttcaaccctgccagggactgagggaaatcccagagcctgggctccgggacgaaggtcccaggacagggtcggggatgtagttgcagaaacagggtaggggacaaaggccggggctgcactgatcaggcgcgcaacgagcccggccctgcctcctgctccgcccaagggtatggagggccggactcggctggccttatacccggagctgattggctggtgagtccagtccctgcctctgatggtttgcgctcataactaagggtttctactgattggtttacatggacgtctgcccattggtcaaatccgagttggtgtaatcagatagttgacacggattggttggtgcgggaatccagtagcttgctatcgattggttgagggtgaaataaatgggactcttatcattggctggcgggctccgcaacggtccaatcatggaatcagtcgagggccgcccgggagggtgggagttaattctttagcgactgaggccggcttgggctctttggctccacctgtgtctgcgcgaggctgttccctattggagtccgcattgttcccctggacctgagtttctcccctggtcctaaaggccgaggcctctgagttcctcaagtgcggtgaccgcaggtctcaccttctcctctccttgcagcaggctgagccactcgcgcacccgccccaggcttccaccttgcaacctctatccctggacagcgaggcctcagtttccccattcgcaccaatgagctcccggtcaacaccccgtcacgcctcagtttcccgaatgttcccagagggctgagttcccgatctctctcccgcgtgggcatccccgaggcctcagtttctccgcccaccccagcgcgccgagcccttcccccgaccccggcgacggccaatggttggggcgcccctcccctccccggggcggggccgcgtgacgtgccgggaagccggagtctagagctccgggcgcggggaggcgcggccatggcaggtacggcgggcccagcggggcggaggcgcggggcgcggggctgcaggggcgcggggctgcagagccgtggggcgagcggcctccctgcagcctctcgctgtccgcagctccggagccgctgtccccggcgggcggtgcgggcgaggaggcgccggaggaggacgaggacgaagcggaggccgaggaccctgagcggccgaatgcgggagcgggcggtggacgcagtggcggcggcggcagtagcgtcagcggaggaggcggcggcggcggggccggggcggggggctgcggcgggcccgggggcgcgctcaccaggcgcgcggtcacactgcgggtgctcctcaaagacgcgctgctggagcctggcgccggggtgctgtccatctactacctggtgagcaccccgcctccctcgtcccatcgcggctcgggcaggaaggggaaactgaggcctggagttcccttgctgcaggacaagcttcagtgtagggaggggacactgaggcccggagctcccttgctgagagacgagccccggtgtggcgaggggaaactgaggcccggggctccgttgactgcaggaagagctccagtgtgaggaggggaaactgaggctcggagctctcttggctgcaggaagagccccgacatgaagaggggagactgaggcccggagctcccttggcggcaggaagagccccggtgtgaggaagggagactgaggcctggagagctcccttgctttaggacaagccccagtgtggggaggggaaactgaggcccagagctcctttcctgcaggaggagctcccgtggaggggacactgaggcccggagctctttttacgggacaagccccatgtggagagaggaatctgaggcacagatgggtccttctggtggggaggacgtagattaccaaacaccccatcccacaaaggagaagctgaggctcagagaggagccaccacccgcgcagggtcagatgggcaacaccccggccttcctgtggtttcccagccgtgaaatggaatatttccccaccatgggaaaattaggggatggttaaatgaataaagccctca[137 bp omitted]ctgcctcccggttcaagcgattttctgcctcagcctcccgagtagctgggactacaggtatgcgccaccacgcctggctaattttttttttttgcagttttagtagagacggggtttcactatattggccaggctggtcttgaactcctgacctcgtggtccgcctgc[140 bp omitted]tctgcctcccggttcaagcaattctcctgccttagcctcttgagtagctgggattacaggcacccgccaccacgcctggctaatttttatatttttagtagagatggggtttcaccatg[131 bp omitted]tgatttgtgaatggtagcacattattccccttctgaatgggagtttctgaatggagcaactgctgagtgttgcatcctggagacacagcagtgatcaagacagacagaccctatccccgatcttaggggtttcttggtcatggtgggcggggtgcagatatctgccaggcagcttggtgcaggctgatcaggtttgtgggtgtggactcccaggcactgaggaggccctgcagccggcctgagaggtgttcctggaagccctgtaaagacatgcctgagggagcgtaggtctggggaggaccccccgggagagagggcatggtgggtgttggtcctgggcccagccagctgactgtcactgcaggggaagaagttcctgggcgacctgcagccagacggaaggatcatgtggcaggagaccgggcagaccttcaactcacccagcgcctgggccacccactgcaagaagctggtgaaccctgccaagaagtcgggctgtggctgggcctctgtcaagtacaaaggccagaaactggacaagtacaaggccacctggctccggctgcaccagctgcacacgcctgccacggctgctgatgaggtacgtgctgcagcctcctccaggaagccgcccaggtcactgtggaatgaggggtgcccagcctggcacagctctctccggaggaggtattagtaatatatacaaacacggatggagcccttaccacgtgacatgcctcctccatccctccagggctggggcggagagaggggacatgggagcttgggctttgagggatgagcaggagtttgtcagagcaagttgaagggaagagctttctagaaggatggaatggcatacgcaaagtcatgtagacaagaagaaagacctgctggtgtcatgggtggctgagggggctggaaatgatggcagggaccagaggggcactgggggaacttcaaatgctatgataatagatgttccctgagtgttcaccagccgggtgaacttgaccaaggaccctttgtgtgccttagtttttttctttttttttgagacagggtctcactctgtggcccaggctggagtgcagtgcccccatcttggctcactacagccttcacctcctgggttcaagcgatcctcccacctcagcctccctagtagctggactacagacgcatgccaccacacccggctaatttttggatttttagaagagatgaggtttcaccatgttgcctaggctggtctcaaactcctggcctccagcaatcctcccacctggacttcccaaagtgttgggattgcgggcgtgagctactgcactggccgttttttttttcttatgtgaaatggagatggtaggccaggcacagtggctcatgcctgtaatcccagcattttgggaggctgaagcaggcaggttcacgaggtcaagagatccagaccagcctggccaacatggtgaaaccccgtctctactaaaaagacaaaaattagccaggcgtggtggtgcacgcctgtagtcccagctactcgggaggctgaggcaggagaatcacttgaacctgcaaggcggaggttgcagtgagctgagatcacaccactgcattccagcctggcaacagattgagactccatttcaaaacaacaacaacaaaaccccaaaatggagatggtaccagtgcccatgtgtggaatctgtagggcaggcaggaaactgaggcaggagcagatgctgtagtcttgtggcagaatcttttttttttttctgtttttgctgttatcgccttcaactgattggatgaggcccacctgtagtatcaagagtaatgtcctttcttcttttcgtagatatgttttttttttttttcaagacggagtcttgctctgtcgcccaggctggagtacagtggcacgatctcagctcactgcaagctctgcctcccgggttcatgccattctcctgcctc[133 bp omitted]ggcctcccaaagtgctgggattacaagtgtgagccaccgcgcccagctgcctgtagatatgttttcataaacttttttttatgtacgaagtttattgcatgaaggagttaacactagtccatgttaaaagcagaccacaaatggttacgttatacaagctgtgaggtttttaaacttgtgacaaaggacagaaaggaaattctactcattgcaaggaaatcctcacttaagcttcagtgagccacaagcacttaaaacccatgaacctgcccgacgcagtggcaaaaaaacccttgacccttcacatgatcctccttagtcagtccagtgtctacaaggaactggcaaatgttcttgcactggtcactctgtagctgaattacttctccatattgtgtttttttttgttttttttttttgagacagactctcgctgtgtctcccaggctggaatgcaatgccacgatctctgctcattgcaacctctgcctcccgggttcaaatgattctcctgcctcagtctcgcgagtagctgggattacaggcgcccaccaccacacccggctaatttttatatttttagtagagacggggtttcaccacgttggccaggctggtctcgaactcctgacatcaggtgatccgcccgcctccgcctcccaaaatgctgggattacaggcgtgagccaccaagcccagctgacttatccatattctggatgctcaattacagtatcattgcaggcaggcaaattgcaaatttcttttttttttttttttttttttttgagacggagtctcgctctgtcgcccaggctggagctcagtggcacaatctaggctcactgcaacctctgcctcccaggttcaagcgattctcctgcctgagcctcttgagtagctgggattacaggcacacaccaccacacccggctaatttttgtatttttagtagaaatggggtttcaccatgttggtccggctgttctcaaactcctgacctcgtgatccacccccatcggcctcccaaagtgctgagattataggcgtgagccatcgcgcccggcctaaatttcttcttaaacaccttcactagtttctttttatcgtaatcatcactgatctcttgcaggacagcagtaagcgttttcctgccatttttctgttgaattcttttttttttttgagatggagtctcactgtgtcgcccaggctggaatgcagtggtgcaatcttggctcactgcaaactctgcctcccggattcaagccattctcctacctcagcctccaagtagctggaattataggcgcccaccaccaggcctggctaatttttttatttttagtggagacggggtttcaccattttggccaggctggtcttgaactcctgacctcgtgatctacctgcctcagcctcccaaagtgctgggattataggcgtgagccaccatgcccggcctctgttgaattcttatatggatacagtcctcagtgccagcaggaagcaggtcatcactgttacttgcatcagcagaggggttgaaagagtggaggttctggatagtggacaaaagatataattctgtttttgagatggagtctcgctctgttgtccaggctggagtgcagtgctgtgatcttggctcactgcaacctcccgttcccgggttcacgcaattcttctgcgtcagcctccagagtagctgggactacaagggcgcgccaccaagctcagctgatttttgtatttttgcatgtttattagagatgcggtttcaccatgttggtcaggctggtctcgaactcctgacctcaagtgatccactcgcttcggtatcccaaagtgcagggattacaggcatgagccaccgcagccagtcacgattcctttgccttggtgggaactgcctgtggaaagcagtggtggcgggagaaggcgagtgggagggatggagcgtcaggaagtgagggtgctcaacgggaggctgccgagtcctcagtggctcagtgagtgggtctattttttttttttgagatggagtgtcgctcttgttgcccaggctggagcgcaatggcgtgatcttggctcactgcaacctccgcctcttgggttcaggcgattctcctgcctcagcctcctgagtagctgggactacagatgcccactaccatgcccagttaatttttgtatttttagtagagatggggtttcaccatgttggccaggctagtcttgaactcctgacctcaggtgatccgcccacctctgcctcccaaagtgctgggattgcaggcgtgagccagccatggagcctggtcaagagcaatgtcctttctgaaagtcaccttactgtagatatgaatcacatgtaacaaatgccatcgcagtaatgcctagatcagtgttccattaaattaccaggcactcttgcctagctaagatgacacaggaaaccattctttcagtatgtattcagttagtggccaactgtgtgcaaggcctgttttaggcactgaatataaagcagagggcaaaaaaagtcaaaaatccctgcctttgggtgggagttgtgggggaagaaggtggttgggggggcttcactgagaaggtgacatttgaacggagaactgaaggtggggagggagggagggtgccatgaggacttctgagaaacagcctctgcaaaggccctggggcacgaccgtgcctggtgtgttggaggaacagcgaggagcctgtgtggctggagccgagtgagtaagggagagagaaggaggtggggaggatgggaaggggacagggcaggtcatgcagggctctgtaggttatggggagaacttgggctttgaccgggaggaaggtgggagccatggagtgttgcaggcagaggaaggacaggatctgactgaggtgctcacaggcgttctctggtggctgctgtggggactagactgtcgggggttagggtgggatccagggaccagggcagaggtgagtgagctggtccaggtgagggatgatggagtggcccaggccgaccatggagcagggaagaagtgggcaggttccaggtatttttggaagtgtatccgccagatttgctgatagatcagatgctggagtcctgagcaagtgggtggatcgagctgccaaaattgggggatgtgggaagggcagatctgggggttcagtggggcccagcatggctgtgttgagtgtgaccctgtgagtcccccacatggagacatagagaggcagctgggccctgagtctggagccgggcgaggcttgggctggagacaggactgtgggcagtgtcaggtgtagacaggatttggagccctgagaggggatgaggccacctgggaggggtgtggagggaggaggcctgaaaacccagcctggggccagcaacagcgagaggggaggtgagagggagccaggcgagcgtgggatccgggggttgtgtgaggaccgtgtcctggtaggtaggaggctgtgctgggtcagatgctgccgagaaggtgacgaggacagaaagtgagatgtgacccagagaggtcacctccacaagggcagtttaggacagaactggaggagaggttatttttaatttgtatttttgtagacagagtctcgctccgtcacccaggctgtagtacaatggtgtgatctcagttcactgcagtctccgcctcccgggttcaagtgatcctcctgcctcagcctcctgagtagctgggattgcaggtgttcgccaccatgcctggctaatttttgtatttttagtagagatggggtttcaccatgttggccaggctggtctcgaactcctgacctcaagtggtccaccgcctcagcctcccaaagtgctgggattgcaggcgtgggccactgtgcccgactgggaggaaaggttactgaaagacgtgaaagccacctatgtatggtgctggctcgctcaatgaacggagcatctaggtgtatgctaaatgctttgtgcgtatgatttcatttcaccctgatgccatccccgtggagttggaggtcattgtgcccttttacagataagaatagacttggcggccgggcacggtggctcacgcctttaatcccagcactttgggtggccgagatgggcaaatcacaaggtcagacgatcgagaccatcctggctaacacggtgaaaccccatctctactaaaaatacaaaaaattagctgggcgtggtggcacatgcctataatcccagctactcgggaggctgaggcaggaaaatcacttgaacccgggaggtggagg[132 bp omitted]gggaggctgaggcaggtgggtcacttgaggtcaggagtttgagaccagcctggccaacatggcaaaacctcatctatactaaaaagacaaaaattagccaggcatggtggtgggcaactgtactcccagctactcaggaggctgaggcaagagaatggcttgaacccggaaggcagaggttgcagtgagccaagatcgtgccactgcgctccagcctgggtgacagagtgagaccgtgtctcaaagaaaaaaaaaaagataaaagaatagatagagttcagagagtttaaacccatttatgcctgaggttgcaattctttgaatttttgcaatcagaccttggcgatgactttgagcagtaggatataaatagctcccatatgcttagcgttccaataatggaaccctaggcataaatggcaatggtgctcaccaaaggt[134 bp omitted]agaaatcccgtctctactaagaatacaaaattagctggatgtggtggtgcatgcctgtaaccccagctactcaggaggctgaggcaggagagtcacttgaacccaggaggcagaagttgcagtgagccgaaatcacaccactgcactccagactgggcgacagagagagactccgtctcaaaaataaataaataaaaaataaattacaaataaataaaaaaaaatgtgaggtcttagcttaaggccttctctgctccctccctccctctagtggtcatgtggggcaatggcacttacggcttaggccaaagggctggggtgggatttagcagggagcgggggggcacccagctgagggtcccaccgctgtccctgacccctaacccctgcagagcccagccagtgaaggggaggaggaggagttgctgatggaagaggaggaggaggacgttctggcaggggtctcagcagaggacaagagtcggagaccactggggaagagcccttcagagcctgcccacccgggtgagaggcgtggggaggggaggcaggacaggggcggatacagctcgggttggggaggagactggggagaggttgggccttgatcttctcctagggcccccaagatggagacatggagagtcagctgggccctaagtctggagccggacgaggcctgggctgaagacagtcccactgcccagttttactcactgccttgacttcttaagctcaaatgctggattttattttattttatatatttatttattttttggtgatggagtctccctctgtcgcccaggctggaatgcagtggctcaatctcggctcactgcaacctctgcctcccgggttcaagcgattctcctgcctcagcctcccaaatagctgggactataggcgccagccgccacgcctggctaacttttgtatttttagtagagatggagtttcacaatgttgtccaggctggtcttgaactcctgacctcaggtgatccacctgcctcggcctcccaaagtgttgggattacaggcgtgagccactgtacctgtttttttgtttttttgagacagggttttgctctgtcccccagggcagagtacagtggtgcaatcatggctaactgcagcctcaacctcctgggttcaagtgatgctctcacctcagcctcttgagtaactgggaccacaggtgtgcaccaccacacccggctaatttttgtattttttttcagagacgagatctcatcatcttgcccaggctggtcttgaactcctggacttgagcaatcctctcacctcagcttcccagtgaaaaaaaatttcttctttgtaaataagagtctcactctgtaactcaggctggagtgcagtggtgtgatcacagctccctgcagcctcaacctcccatgctcaagcgatcctcctgcttcagcactgggattataggcatgcaccaccacacccagtggccacctaatttgttctaacttgggctggggagggactgaccctgcctttttctctcccagaggccacaaccccagggaagcgggtggacagcaagatccgggttccggtccgctactgcatgctgggcagccgcgacttggccaggtcagactcaccccaagttctgcccctgccccagctcacctggatctcttgctggtcttggggtagcaagggcaggggtggggggtgggacagagcctcagatcctcagagctgtggggttgggggagtcagtgtgggggcgagggaagagcctggggattcctgagactgtgcgaccctcctggcccctacaggaacccccacaccctggtggaagtaacatcctttgcagccatcaacaagttccagccgttcaacgtggctgtttctagcaacgtgctgttcctgctggtgtgtggcccaccctgtctaggggcaaggggctccggagcccagtcggtgggcagcgggcggggctcccctgcgtatcagctccatgagagctggggccttgtctgctttgtttgctactggtacactgtgggtgctcaataaatgtatgaaggagggtgcgtggccaggcccagtggctcacacctataatcccagcactttgggaagctgaggcagcgggtcacctgaactcaggagttcgagacaagcctgggtaacactgaaaccctgtctctactaaatatacaaaaattagctgggcatggtggtgcacgcctctaatcccagctacctgagaggctgagacaggagaatggcttgaactggggaggcggaggttgcggtgagccaagatcgtgccactgccctccagcctgggcgacagagcaagactgagtctcaaagagaatgagggcacaggctggctccagtgttggggcagggccacagcctgagccagtcttttgctgttcctcccttccccaggacttccacagtcacctgacacggagtgaggtcgtgggttacctggggggccgctgggacgtcaacagccagagtgggtatccagggccaggtgggcgggggcgttggaggaccggggtcacggggtcacagctgcccctccccacagtgctgacggtgctcagagccttcccttgtcggagccggctcggggacgcagagactgcagctgccatcgaagaggaggtgaggggctacctgggaggtggcattctggggagggttgggaagggacatagctgtcctggcgactgcccagtggctggcagtgtcatcacccagcaaccgtgcaggtgagcatgcccgtctgtgtgcttgggaccccatggtgaagggtgaagaacactgctttttttttttttttttgagacggagtctcgctctgtcacccaggctagagtgcagtggtgcgatctcagctccctgcaagctccgcctcccgggttcacgccattctcctgcctcagcctcctgaatagctgggactacaggtgcctgccaccacgcccagctaattttttgtgtttttagtagagacggggtttcaccg[138 bp omitted]ggtcaggatggtcttgatctctttacctcgtgatccgcccacctcagcctcccaaagtgttgggattacaggggtgagccaccgtgcctggtcaggatggtctcgatctcttgacctcgtgatctgcccacctcggtctcccaaagtgctgggattacaggtgtgagccactgcgcccggccttttttttttttttcttgagacattctcgctctgtcgcccaggatggagtgcagggcgcgatcttggctcactgcaacctccaccttccggattcaagtgattctcctgcctctgcctcctgaatacctaggattacaggtgtgcgccaccatctccagctaatttttgtatttttagttgagacagggtttcaccatgttggccaggctggtttcaaactcctgacctcgtgatccacccgcgtcagcctcccaaagtgctgggattacaggtgtgagccaccgcgcccagcctaagagcactgcttttggatctcctagccctggtgctgaaacctcgccagccccctcccctctcagagccttggtttccttgtctgtaaaatgagcggcttcaatgaaaggccatcagatccaggcaccgggggttcacacctggaatcccagcacttagggaggccgaggcaggaggtttgctggagttcaacaccagcctggggccacagcaagaccccgtctctacaaaagataaaaaaaattagccagacatggtggtacgcacctgtagtcccatctatttgagaggctgaggcaggaggatggattgagtccaggaggttgaggcttcagtgagctgagatggcgccactgtgttccagcctgggtgacagagcaagaccctatatctaagaacataaaaagtgaagggctgctaatattgaatgctcagtgccaggcctcatctattaaacactactcataagtgccagttgctattcttttttttttttccttttctttgagacacgatcttgctctgttgcccaggctggactgcagtggcataatcatggctcactgcagcatcagctgcccaggttcaacatcctcctgcctcagcctccatagtagatgggagtacagacacacgccaccacacctggctaatttttgtatttttagtagagaagggggtttctccatgttggccaggctagtcttgaactcgtgacctcaagtgatctgcctgcctcagcctcccaaagcactgggattataggcgtgagccactgctcccagcctagttttaactgtttgttgagtgcttactgtgtggcgaccattattctgtaagctgggctacagcagtgaacaaaatgactttggtgtcctggctttgtggcagggtgcatcttttatattaaaagaggtccttgttggctgtctctccagctcccactggactcagtggcggtgggggcagggcctgtcttggtcatcactgtgtccccaggcctgatacacagcaggaattcgttcagggctggccagccacataagctcactagagccgttcaggcccctgtgcccgctgagctgcgcctctgtccccagatctaccagagcctgttcctgcggggcctgtccctggtgggctggtaccacagccacccacacagcccggcgctgccatctctgcaggacatcgacgcacagatggactaccagctgcggctgcagggctccagcaatggcttccagccctgcctcgccctgctctgctgtacgcgggatggggctgtggggggagcaaggaggggggatgctgggccagccgagcctcccagggccaacccctctccctctctcccgccagccccttactattctggcaacccaggccccgagtccaagatctcacctttctgggtgatgcctcctcccgaggtaggtggggctgttgggagagcctggggggcccgggagcactggggcatttgggtcacgactaggcaggggcccctggttccaggctccactggagagttggggccccagtttctccatctatgaaatggggacgtgactgctgccctgcccatattttggtgaggtcctgggcgtggggcctccgttgtgtcattggctgctcagtacaaagagggctcccttcctgaccctgcctggcttcattccccaatcctgccctgaagtcagaggtcagccctgggaagtcatttcagggccctggctctcctctgggcctctcccacagtaaggatgctacactgcctccctggtcccaccaccaggtgccgatcccggtgcagagctgagccggggtgtgcactctcccgttcccagcccgggcactgccaattgtccccagctgccatgggctgcgggctggtgaggcttctctcactggtctgtgtccctgccagcaaaggcccagtgactatggcatccccatggatgtggagatggcctacgtccaggacagcttcctgaccaatgacatccttcacgagatggtgagctcgctgcggggcgggcaggcaggggctggcagtgcgcagctgggcacacgatgcgttggtctgcttcccaccggtgggcttgggaagctatggctggtggcgccttgggggcctgggttagggcttcttccatcactcaggacagagtccaggcccttgccagggtccctccaacttctgccctccctcacctccccacctgctgttctctaaggcactggcctcttctgccaggctgtccagtagagaaaccccagggactttgggtggtaactggatgaacactta[136 bp omitted]catggcgaaaccctgtcactaccaagatagaaaagctagccaggagtggtggcgggtgcctatagtcctagctacttgggaggctgaggcaggacaagctcttgaacccgggaggtggaggttacagtgagccgagatcacgccactgcgctccagtctgggccacagagtgagaccctacctcaaggaaaaaacccaacaaaacctaaactagttcgtcaaacctgtgacctcacaggtgtcactgctggggatgaggccgaaccagggggccacgtcaggcccgcgtggttctggagaactgggctcggtgagtgcaggtccaggtggacctctcgtggcagccacttgggcaacgctgctgcctccccctcgagagagccctcctggacctaagctaggtgagccctctggctaaggtcactcgtgatctctttgtggttggtttgttagtgatggggtcatgtctcagggctgcctgagactggaaccccaggagaggcgctgaggtacctcaggcttggagggagcctgggagtccatgctcctctgtcctgtagatgctgctggtggagttctacaagggttcccctgacctcgtgaggctccaggaaccctggagccaggagcacacctacctcgacaagcttaaggtgagccccaagtccccgcagacctcctaacggggccccaggagaggccccctgggcagcctaaaaggtggcagcaatgagccccgtgggcctcaggggcctgagacagcccagctggcagactggtgaccctggtcaccccgtggccaccccagcagggtgcaggccagatttgattggactgtggagctttaagctccggcagtgccggatgaggtcctggcagcgggttttgggagtggctcccctgcagagggcccagggtcctggccacccctgagtgtcttagggtagtggttcctggtttccctccacctggcatagaaagggactcattctgctcagctctcggctagctgtggaggctgtggtgtccccatgggtgtctggaaccaggcagggaggggctgaagtgggggcaggatcgggagtgtgcacataagccccacccctccacacagcaccgctgcccctgggagccaggccctcggttacatactgccccactgggtaagcagcaggctgtgctgcgggaccccagccctgtgcctcggtctcaggggggctcagtcaggatgctggacttgcacggtggactgtgaggcgcagggctggctaggacccccgggcacagcctgaggcccagccccctcgtttcagatctccttggccagcaggacgcccaaggaccagagcctgtgtcacgtcctggaacaggtgtgcggcgtcctcaagcaggggagctgagccttccagggcagggtgggctccagttgtcttgagggtccggatgggctcaggtaataaagaaacggaagcagcagccagccacgctggtctccccaaggctggggtgagggtggctgggtgcccaggctggtaccatcaccccagcttcctcacttccagggcagggcattaacttccaggatacccctcagcccctgcacctgggaactggcacaaaagcctcagggccagtcccacccaccttgggctcaggagcacctggggtgctggagggacctcctggggtgtgtgtggctttggagccggcccctcaggaaggcggtgggtggcaggcccacccctgcaccaagacgaggcaaggggctgtagaaagagacatttaatacttctgtttacaaaattcaggcgtacatttcagtttgccctggaccgtgcccaaagctgtgtgctcatctctgcgcccctcatgtacttctgacgaggggggtgcagggcagggcagagcagagcctggggtccggaggcttcactggaccacagggggaggggaatgtgaatgtggcctggcccagagaactccccatttcatcgattttgcattgggcgatagaggaagcagatgtcggggctgcctgccttggtctagaggagatggctggggccacttcccacagggtgaagtggcagcggctcagcaaggggagcctggccaccaggggctgggacatgcgctcactggaacctttgtgcttggccctcggcagcgcggctgtggtcccgtgtgaggtgtgctggggtgggtgtgggtggctggtggtggcagcttgtgccagagtgacacaggcctccctgggttgggatgggggcagttaaaaagctgaaaaggtacttggctttctgagggcggggcttgggaggcagggccctgcaggagaccatgttctctgtcctcaggcagatcccagctggcctctgtccccgggctgcaagctgacagcaggcccgggaggcggtgaggccctctgccctggccttgaggagaaggagtgcgtgtgtgaggcgggggtgcattggccctggagtagggccagggcccatcaccagcaccaggctgggagggatttaaaaccagggtcctatctctgagccaccccatggggaccctcgatcccatcctgttaaggctgcgggactcgagggtaggcagtgggccgggcccccgtcgggtcaggacggaggtgggggctgccccagaggaacattagtgtttctaagagcaccttagtgttgccccgcctcggccagctgggcgagaagttggggagcgggggaggaggctggcgccatggagtggggaagggagccgtcaccgttgggagtcagcgctagtgtaaacaggcatccccacccacccagataagcccccccacccaagtgtggggtcctgctcagggagtacctcaagggccggggcccaggtggcgccggcaggctcagacaccgccctggcagcaggggctccgtggaatgcaggagacccagcagggggtgccggccagtgtggacggaggggcggggcggggacacgggtgagtcactgcggcaggggcacaagcacctccacgtagctgagcgggaagaagcccgactggccgtccagcatgccctcgtaccagttctcatcgatctggttggtcagcgtgatgacgtcgccctcatggaagcccagctccccgtcgttctcgggctcgaagtcgtacagcgccttgcagctcggctggtccaggggcgctgggggcgggagcgggctgtggggctggggctgctacgcctcaccccgcccagtctggggtctcagacctgctgtgacctggagcgtgtgggtgggcatgggcctcccctctgccctgcctgggccaccccctgcccctgccacttctggggtccggcctctactgccacccaggagggaggatgggagaagcttggtttaagtggtcaccaaagctactcctgggaagtgctggggacacccggtgctgctgcggtgacagggagtgaccagatgccctcaagcccttgtagccaccacacagcctagagctagctgggctagtgcccttggcaatccctcattcacactgtgaggctgagacccagaggggtggcatcttgcaggctgtggggcctgtgccccctactgctgcacgagcctggcccctccctgcttgagatgggcagagaacagggcgggaggagaaacaccctccccgaatggccgagaaggcagcactgaggtcgaggcgggcctgggaacactcacgcatgctccggctaggggtccggatgggcttgtcggaagatcggaaagacgatgaagctaaacacaagcaaaacgaggaggctgtgggctcaaaacggtcgggcagggccccttctgcagaaggctggggccagcccttcccgtctgccttggcggtccagatggagcacggctgagagctgcacccaggagtctggcgctcagagacccaggacagggccagcccttggccactcccacccgctggcatttgcctccgcaagagggctccatgccccattacctgcgatcttgggggctgtggtgcaggggaagcccccgttggactgctcaggctctccaaggtcaaagggctcccggggcttgggcttatactcccgcttagggcgtgaggaagcttcccgcatcctgtgaagggagaggcgtgagtggaccgagcccgtgtcacggccgaggcagccccactcttgtatttatgctgctgcctaatgacctggcctgggactgcaggaagaggccgtcagtggggttgtgacacatggaccctgggacacagctagactgggatgtctacccagagggcctccagcctggacccccaccttggaggcatcccagagattgccaagcagctggggcctgccacagcatctacctacaacacccccagtcgcatcccctgcctcctcccccaattccccaccacggacggcgccccacatacgccaaggcccctgaagcaggtctggcctctgcattcagggaggggagcctgggtgttcctgtggcagcagcaacgtgcagccagggagggagtccccggggcctgcatcggggcagggctgggtgttgactcagagttctcagagccccagctcctctgacctcgcggccccccaggcctttccactcagtccccaggaagaatccaggatgctgctctgccatgtgctcaccccacagcgaggtgtgctgcccacttgcgctggcagagggcgcatggcagcccagactctggagagaccaaggccctgggctcacctgcgcttgagcttctccgccagctcgtccaggatctgcacggcctgccggtggtagtccagctgtgcatccaccagggccgagagctgactcacctgctcgatctgtggggacagtagggctcaggggctcctgccagtgccactgtcctgtgccttccctgactcccgaggtgaagccacaggaggcaagggggctgagaggggacaggggactggggcccataccctccacctcccctgctgcagcggccaggtaggtgccgatctgtcctccagctcccttgaggcaccaccccggcctcccaagggcataggtcttctcaggatgtgacaccccgagctactcacgtcagtctccaggaggttgtgcatgctggtttctgccacctccttggactcctcgaacttctccagcgcctggcgtagctcctcatcggggatcttgccctgccgcttcttcttgtagtcaaagtccaggcggcggccctccagtttcttcaggtggtgctggagacgtgggggacatgggtcacaccagtagcggccagagggccgccccacgcatggctttgacccactgtccctgcaccactggggatcctgcctgcctgagacccagagggcagtgccgaggctggaggtgagggtggcaggaatggggctgccccatccggcagggggaagggacaggccccaggctggcgcaggagcagcacctggatctccttcaggtctttctcgcacaggttctggagggggtcaatgaagttctgcttgacctcgatgtccagggagtccttcacctctgccaggcgcttcatggactcgccggcatccagcaatgcgtcacctgtggagaagtggtgggggaagccatcataccgggcctgggaccactagactgagacactcctcagcctttgtttttgaaatagcgtttcacaggctggaacgcagtggcgctgtaccagctcactgcaggcctcaaactgggctcaagccatgctggcacctcagcctcccaagtagccgggaccacaggcgttcacccccacacctggatcctttccaacttctttgagatgaagtctcgctgttgcccaggctgcagtgcagtggcatgatctcagctcactgcaacctctgcctcccaggttcaagcaattctcctgtctcagcctcctgagtaagggggattacaggggcctgccaccacatccagctaatttttgtatttttaatagagacggggtttcaccatatagaccacaccggtctcgaactcctgaccttgtgatccgcccgcctcggcctcccaaagtgttgggattacaggcgtgagccaccgcacccggtttttgttttgttttgttttgttttgttttttcatagtctcggctcactgcaacctccacctcctgggttcaagtgattctcctgcctcagcctcccgagtagctggggttacaggcatgcactaccacacccggctaattgtgtgtgtgtgtgtgtgtgtgtgtgtgtgtgtatatatatatatatatatttttttttttttagtagaagcggggtggggtttctccatattggtcttgctggtctcgaattcccgatctcaggtgatccacctgccttggcctcccaaagtgttgggattacaggcatgagccaccacacttggccccatcccaacttctaacagccccccaacactctaagcccagggcccggaaattggaactcagggcaaaacaaaggatcctaaaatccgaatcgatgctggacgttaaaccagaccctccaatgctcctaaaagggcctaggtttgcccttaacaggtggaaggacagatgctggggggtccaggccctggggaagcagctggcttgagttggggaaggtctggagctacaggaaggggccctatcagctgctggccagtgctggatgggttggtctgtgcagtctcctgcacctctgcagctggaaagctgtgggggccactgtacgtccccggcactcagcacatgcagggcctggacctgccctgcctgtgttgaggtgtggcctccagggacggtgggcgtggcttccagagagcaccactcaccaaagttggactcgccgcccagctccttcccgtggcggatcatgcactcgcccagaagcccctccgactgcgggtagccggggttcttcacctggccccggatcttggacaccgtgttgagcatggtcagcttagcccgcgaggctgggataggatggccaggtgggtgtgggctgtgaggcctgcactcctctgccctggcagactgcagcccccacatctcctccccacccttgcttcctgtgcctgtggacagcctaggccacacaaagcacagtggaatccccagagggtcccttccctgctcctgctagcctcaaaggagctggcagcgggtggagaggtgaccaagctcctcagggggcaaaacctcctccttccaagggctgctcctcttggaacgtggctatgacccctcatctggggggtgccagggaggaggcgcagcagtgatgtgcagcggggggtggttgaggccaaggctcccggggtgggtgatgagctgtgtcccttccgctgcccgcttgggtctgctcctggcagggcctgagtggacactgctgggtgtgcgtctgccccctgtccgtggcctcctatggagccagcatttgggttttccttggggaaaagcccgtctctcagccagggagacccagtcccaagcccaagaggtgaagtccaggccaggggcactggggaggggcggccaatacaaatggatcccacaagtaagctgggggagaggctccctgccaggactgctggctggaagaggggttgaaggctgggacggccctgaggaaccagtcggcatgagagtgaagccaacagaggggctgagctgctggttgaggtggaaaggcagcatgcagcaccaaggatggcctctgcactccgggatccagctgtgcctgaagcccacaacccatgagcctggcggttctgtcatcccctgccttccctctgacacagaggccagagggcctggggcaggccctggcagtggctggagcacccacctgggttgggctgcaggtactcgatggtcctggccagcacttctgtcaccgccttgctggtgacatccaccttctgtgaagagaagcagcatataagactccacagccagtgggggcccaaggcacacaagacccccgctgctgcaccgcctcctgccctaagagcccataccaggaccccccaaccccctctccatgtcttcagctcagccatgtccccacagctgcctgcccacggcaggggagagagctggtgcccgtcaagtccagctgacgaggcccccacaccaccccatctctccacacctgccgggccccatcactccagacccaggcccatcaaggttggccgcctccactatgcccggcagaggtcaggccccagcagtgccaccaccacacagagcacgcagtttcttcctcaccttctccatctctttgaagtcatcatccagcttggtcccctcggcccctccgaccttctcactgaccagctagaggacagaagaggggaaacgctgtgagcccaggggtaggaggaagaagaggacaggaggccctgagccgccttccagccacatcgcatccacagctggaggcaggaggccaagtgatcaggacacacacctcaggcactgccgtgggcaccccagggccacacgctgcctgcagagcagggtgggcctgcagggggagggggagggtgggggtggcctgcccacctgtgtgtgtcccgactgccactcacatacccactggggaccctgccacagtaggccccatctgggccacggtggagtccagagcctcagcctgagaacacatggctcagaagacactgcttccagaagcgcctacacaaacatccccacagatagcaatgtggggatctgcccccatccttgagtatgtggggtctacttaaaaaaaaaaatcctgccagcttggctgggagaggcagcaggagctgacagttacgagaagaggtgcaggcagccgggcagggaggccgccattctcctgtgctctggtgcccgtgtctgcaggatgggacagcccagcccttgccccatgtggacactgagtttcacaaggcagtcaacacaggcctggcacaccttggtcctcacggctctcagctacggtgaaagcgatgacaatgacaggcacttacagcgtctttcctcgtgtggtgggaaggcagaagcaagcactgaattcccaaaccactccctctgacagcgcctgggatgcgaaaaacagccctgaaatgtcccatggaacatggcgggaaccactgaaccccagcaccgctgtctgagcacaggcgttgctttcttcaccccacgtatcccatgtgtgcctggcgccaagggatgccgcacagagtgaggatggacagtgtgaggcccttcccagcacacagcgcttcatgaagagccgagtggctgccaggccctgccacaaatggaggctcccagagggaggccgcctgaggtcacaagcttggccctgccctctgggggccaagtgtcacagggtgtgccatctctgaagtcatcggcaaatttaacatcccgggtctgatcacttgtgtgaagacgtgcacacacggcctgggcaggagagtgaggtgttgcgtgccgtgggccatggcctgtgcccctggtgctccccaggtctgattggtgcttgcctgccccgagctgtcacaagacgtggccaagggatgccatgagggtccgtgtggtgccacactgcgttggctgtgtggggctggggggtgtccagcagggcagtcaggagtttaggacccagcctgggaggaagtgacccaagagcaggaagtgcgggggcaggagaagcttgagcctggggctctgcccacgccaggcacctggtgtaccctctagcccatgcctggaggtcacagcccaaggcaccatgagtgcaaatgcccccaaccccaagttctgcaaaaggtagcctgcccggagtacacggctggtcttgtgtcctggcaacctgcccaaaaagacaccagcccctttgccaaggaattcctggccctcctccaaggcttggctctggaagcccccacaccacgggactgtcctcacccacgcatcgggaccctttctgtccacctgccttcatgtgcggggtgtgccgggcattcagtgagcacaggccccatgcctctgacccctgtccctttcctgcctgtgggttggtggctctcaactcagccacacagcaccttggaagcttcttaaaaatcccctcgttggccgggcgcggtg[169 bp omitted]gaggtaggagaatggtgtgaacccgggaggtggagcttgcagtcagcagagatccagccactgcactccagcctaggcgacagagcaagactccatctcaaaagaaagaagaaagaaaaaaaaaatcacctcgtcacacccaccgcgggagggctgactctggcacaggtgagaagcaggaactgtcccttgcggggcaggagagtggggctgccctccatttctgctgaaggcattaggaggaaggagccccccctccctaggtgtttttggggcgttccactctatttcctgggacagtttcacttcttttgattgtggcgagagagggcgtgctcagagccagcggctgccggagagggaaatgagtggctgatgtgagactggactcttctgggaagccgggaggagaactgaagccagcgggctgcgaaaccacaccttctgggcggaggccaccccggccccacgacctgcccaggcaggacccagtgtgcaggctggcaggagtggctccgtcagggcccttccccagccccctgcctctcacagggcaggaggagaggccctaccggcgaggaccacatcctgcctctgaggggaggggctggggacccgccacggtaccaaagacccacctggtggcctctggctctggccctggccccacctgcccatctcacctgggaatccaggaccctgccttcctgagccccaggacgacttcctgaacccccacaaccgcctgactcctcgcacccctgacacccgggaggctgtgccctaactacccgggtccctctgctcagctccagccaagtcccttgtggtgactgatggtcccccacgggccaggcactgggcaggggacacaaccctgtaaggccccttctctccaaggcttatgggctagaaaccagcacagatggacacagggatgagcagccacaagggaaacacgggaaaagcaaggcagccgggccacgtgcagcgccggccgcaagcgcggaaaccaagcgtgggctcctgcccgctggggccctactcactgcggtctccacaccagcacactgctgagcacggaggggaccgagagtctgcggcagagctgggcgccacggggaggctcaccagagggcgcctctgggctcgctgtcaggagcgagtgttcctaaccctggtgccatctgccaggcaagagctgcctgttgtggggcagccagccccaatgcccccgcatcagagaccctaccggtggggagggaggactgaggccatggtcccagcagtccattcctgccgagggagactctgcaggctggctgtagccctgactagtgcagcggactcagcagtggcaatgacagctccgcactcgagtccatcccatacccacaaggctcgcctcctgttcccaccccgcatggcaggaaacggaggaaaataatggggccactcagtagccagggacccaacagggctcaggggtgagaccaccctccgctgactgaacctgcatcagggtggcagggtgggtgggggccccctccccactctcccacagggccccacctggacggggtcagagtaccagctgcaaaccccgagtgaccaaccgcaggccccacaagggctgccatcctgagagcaacaccagcgccttctctccccatgcctggaacaaacaggccgagcccaagagggaacagtctccaagactctgcccctgcttcagatgccggctggcctcccacagaggctgtgacatgtccccgcctggagcagggagaagtgaggtttggccaaccctgccaggcgaggaccagggctgagaagtcactatgggagaggccccggctcagtcaggcctggcagtggcctctgggaaggatcccactgttgcctgccggacacttccccagggtttggcaagactggcttgtggtctttcagatctttgcccagagatgcccagcggagacctgcccactctatgctcacgcatcccacctgcacccgccacctgcatgccgcatggattttctgcctgaccctgtactctgtcacctgtgagccaggcacctgggaaacgagcaagctggacacgaagatggggttttgccccagagcatgggactcttgtccccctgggagaagggggctattcctttgaagcctggcattcattagagtttagacctttggctctctttggaggggagcaagggatgtgacacacagaacagagaatacaaggtggaaaaatacagaaatgaactgtgaagacactgtggactgagagtcaggacagggctaccgtaggcaggagaatcccaggttttacccagaggggtgtgggcagctgccctgtgcccggcaggcacagctgtggtggccacttggcaggagcaggaggaaaattccgaatcctgccgagtggagctggctgctgccgatgggcggccttgggatttaaacatctcagcggggaaacctgatccacacagcacggaacacaaatgcccgtctcgggcttggtgccccagcagactatctgctctgatgaattcacagggttttgtttttttttctcttttaaagaagaaagccagcgtgggggagggcaagggagggctgctgtggcccagcctgcagggatgcgccacatttgcccgcagaggggtcggccccagggtcctcaggtctcactggcagtcatgctgtggtgcttggtaatttccaggttcacagcagagttcacgggtcctccctcggctggggagcgggtctctggctggtgtctgcctgcccgtcggcatcggtggtgctgtggtgctgcacgctgtgctacagagccatctccgcgtccctccctgcagtcctcctcagcggaatctgtgagcgcacagaccacaggggcctcgcccagtgccaggcacagagcggagaaatggcaggtgggcacggctggtcaaccgcagcgaatacctgtgacaaggcctcatctttttttttctttttaaagaggcaggggtctcactatgttgcccaggctggtctcaaactcggcctcaagcaatcctacctcagccttccaagtgccaaaactacaggcatgacacagtgtgcctggccaaggccatacatttacaggactaggggacaacagccccaggacaaagcatgggttggggagctggggaccataggagggggtccaggcccagccacctgcaggaccagggacagggcaggcaggacacacggaacaagggccactattcacagtcccatgtgccagcccccatgctaggcactctgtgcccggcccccaacgtcacagaggaggaagctgaaggggacgtggaggaggcgagtgctcagcccctcctcacagtgggcgcagttctaacactgcagctgtgttcaaggcctggtcagccatggaaaggggcaaagccagggtaaggcctgcagaagcagcagagtccttatcagacctctgtgcaaaacagctggaatacagggtcggggtggaggccccagggagggacgtaaggatccctgtggtgtagaaaaagccctgacgtgggaagagggcaggggcaaaggatgtagggatgtatcatatccgtgtgtctctgaacccctttccatctgcaacgcccttccctgctggcccaacacctgggagccactgcccaacacacatggccacctcgagtccatcacagcttctttcccatgagtcaaaaagtcgaagacgcgcacagcctggaggcggcctgctgcccagcgacacaggaagccactggccttcgtgtccccttttccatgtgggctcccaggctcctggcttgctgatgtgtctgtctgtccttcctggaaaccttcagtggccccagtggcatggggactctccagacctgaggcccttgcgtgctgactatgaaagctcgcctatctacaggggcggcgctggctgcaggcagctctgagctttcctgtgacagtaagtgcctggcatgggtggggttgtggcccctgggctcctggtctgggagcctgcagggcatccgcaggtgaaaagcaggagtagtcattcctgcacatgctcagggatgaggccaggagggggagggagaggagcagtgggagggggggccacaggagcaccacaggtgccaagtgaccctcacaggtgccaggtgatcctcatggcccggcggcgaggaatcagacggcagaaacccactccccagcccaagggaagatggagggagcctctgccttggggctgactgggtcatcacccactgtgtgtgatgcacggagggaagggtcccgacagccggggctcccctcagcatctgggagttctgagagccctggatttgccactgtccttcgagcctccagcctctcagtagagatctcccctcctgtccatcaaggctgaatggtttttaaaaagcagcctttgggaacggaggcactgaaaacaatgaatcaagacaaagtttctgaaattattttctcacggaaaccccaaaccagacgctgccaccatggccagattgggcacccggggacagccacagacccacctctgtggcgggtcaggcgctcctctgggaaccaagctctggcagcaaaaggacagtggctctggaagccccaggcgtcctctcagccaaaggggcagtcccttgggcctgggctggcaaccgagataccggctctggactggaaccagaatgggctctgcctcagaccaggccacagagggccccctgagagcccggcttccccacggcccccaggctgtggggacaggcctgccacagacttcctggccagaggtgtggctgggtgccatggtagggaaagacagccagacattgggggccatggtgcggcccggccaccgcagtctaaatcgccttgggggtgcgtttctgccaactgtggtgctggccattcatgccgtctctcaggctgtcgggccctgccctgcctgactcctggctcttggagctggagaaaggactctcagattggcagagagcgataaatgctttgttgtgtgcgcggcagcgagccgatgtcatttgaagtcacagcacatgaaaatgagggggagaaaaaaacttaggcaagagaaatcctccagatgggccctggaggccccatccaagagtctgaggccaacacatcaggggaactggaagcagagagggaatcagccactggaaagaagtcacgcagacgaagtggtgacagccacgacaggaaattgctcagcggtggccacaacagagtggcagccaggggccaggggccagctctgtgaccatccccgagagagaaaggggacattcaggcctggtctatgatggtctggtggccggaggctccgtgagggcagccccagggccagaaggacctctcctgtgctgacagcaaagtcaccagcgggagtccagcccacactgcctttctgatgaggcctccagctctggctgctgactttaaaccctaaggaaccctgtgcagggcctgcatcccggaaggcctccaccagcccgaacctggcccgtccgccctagatggggcaatcggcgtttctcccgggacagcctcctccctggcctcctggccctcgtctgcattgagaggcttggcctctggtccgcatgctgcccttcccgtgctgtggccttgcagcccggcctctcccctgctgtcccccttggctctggcctggcccctgggcccctgagtcacccctgaggtgactcagcagtccttggaaacgcatgccgaggacgcaccctgcctggcccagctccacatgggtgtgggggaggctgcgggctgcgcctggtggccgtatggggcctaggctggccagtgctgcccaatggtgggggctccctcaccgcccgtctggcagaagccatgggccacacgctgtcccagcacatggtggcagggcggtgacctgggctcggctctaatgaccggcagccctggggctcccatcaccactaccagtctgcccaggaggcagcagagcactgagcccgacctgctcccctcgggcacctacgagacccacctgcccctccatgcgtgggggagaaggggtgccctctgctgtggaaagctgggacctactgtctgtggtgcgaggctgaccccacagagctccaggacaaccccgagaggagtggacagagccagccgggccctccagcccccacctggcccagctgccgcctctgggcagatgtctccacttgataaacaggacagctaagggcctaggagagacatgcctggcccaaggccagacagcaggagtggctaggaaggtcaagggatccccactgcaggccccaccaaccctggctctgcctggaatgcagtcagggcaggtggaaggggaggggcaacgccccagggctgggcgaggaatctgggagcaggtgggaagctcatgctaccttcccaggagacgggaggacaggcctgccaaccagggggctcagctatgtgggacacacgctcccacccttgcccttgcacagggtttcatccaaacatggagatgccagtgagtgcctggggctcctctcccaggaacaaaccacacccagagctccagcccgagcgaacacatctacatgaaaatcagcctcatgcatcatgcattgtaatttctcatcttggggaccaggcaggagggctgtgtgacatacaactggtaaaatcagtttccgatgaaaacttataaaaggaaaaagccaacccacaaacaaatgaggcgataaatcccctgaggctccgcctggcagggaaacaccagctctgcagcactgagcacaggctggtgttcccactgggggcagcatggaggatctgcgtccagggggcagagtgtgatgacatcacccacatgcacaggaacgataaggctttcttaaaaaacgatcttttctcaacagctcctcaaaaggagctgaggcaatgcatagccctgcaggaagagactggaaatggtcttggagagagaactgcggggcatggtgacagcggtgagaggctgcaggtgcacagatctcaacgaggggccgtgagttccctcactccctgagagctgaggagacttgcccgaaagcccagagcccttcctgagacacagaaaccatcttcaccatctctaagatcccttccatttctgaaggacttccatttctttgtgactgtgggccaccatgggcatgagtcacctgtcaccagagcctggtgtccctgtgcagctgtgccaggtgggcagaggagacaggtgaaggcacattcctcagcgcccgctcacagctctgcccaccgtgcattctgtagagaacctcagcgccctcctccctgccggcagccaggcagggatttaggtggtttctgtttggcctccagtgcttgcctctcccgtgtcctatccgcccagacctcagacctcagagaagcctcctcccacaggaagctctcctgattgatccccatcactggtctcctcaccttctcccaacacaccactgatgcctcctctctcgtgcgcctgccccttcacacttcatcttacacccccatctgcctgggcggcccccccatctcccctcagagcttttgctctcgctgttccttctccctcactgagcctccctggatcttcccatgctgggtcttagccaccagggctctgtccatccaaatgtccccatggctgcaaggctgccccaccctcctgctatcctcacggggcctcgcattcctcttgcttgcttgttttcgggtcccctgctgtcccgtctcagacacaggaagcactctccaatgcttagcgccctagaataaaggaccccgggcaacctcttgggggtcctcgccacatcccaccccttgacagcagctaagctccgggggcagcaactccccgcagtgacccggaaggcagccagatgatactcctcccatcaccttcccttttgtggctcgtggacggttcacctgggctgacactgatggaggccgccaggcccattcccagcctggagctggctccctccccagagagctgcaaggttgggaaaatttgcaaagaacaaaacgtgagctaggcaggcctagcctgactcacatcctggggacccagctaccacatttgggcagtttcttatccaggaggatgcccgggaacagtgacaggtctgaggtctgggcggataggacacgggagaggcaagcactggaggccaaacagaaaccgcctaaatccctgcctggctgccagcagggaggagggcactgaggttctctacagaatgcgtggtgggcagagctgtgagcgggcactgaggaatgtgccttcacctgtctcctctgcctatctggcacacttacacagggacaccaggctctggtgacaggtgactcatgcccatggtggcccacagtcacgaagacaggttttctgaggtgtggctaccaaaagcacccaggccagaagtcatcccgggtggcacggggcagggcagggggtggtgagaggcggtcagcagctctgcacagccagccgcgcctgtgcactggggccctctgcgagcattaggtgccagcagctgtcaccttgcagtggccactcctgccccctcgccaggtcacgtgcactggctctggcgcatgggtgcccctggccgctcagaggcactgcctgctccttacacagtgatgtcggtggtggaaacccgggctgggaatctcagaattgctgaccacggcctcagcacagaggaagcaggcaaatggcccgagtccccccaccatctcccctgcagcgagaagactgcagcctctcctgtctgaagactcgcgtttgggtcccgggcctgggagattctggcgggtgcagcctgcttcccagggccccttctgccccgctgtggctcatcgtccttggagggacaccactcgggacaggctctcgtcgccaacccaccccaagttctctgtcctcaaacacaagcttcctgccagcagggccaggcacagggacaggggtggcagaggcagcacagggcctggcacccaggtggcgtcagtcactgagtatatggtgagataataaatactagttgttgagataacaaataaataagaagcagccctgccctcgggagctcaggtgtgccagtaacacatcagagcaaaggtgtgccgtaacgccacgaggcaagcaggctgacgtgggattagggtgcctggatgggcgacaccgggactggatgtggttccagctctgccgttcggggctgtgactctgagcaggaacacaaacccctctgagcctcggttttctcaaccatctcaggcgtggatgtgctttagaaactacacaccaccaggccaggtgcggtggctcacacctgtaatcccagcactttgggaaaccgagacgggcagatcacctgaggtcaggagtttgagaccagcctgaccaacagggagaaaccccatctctactaaaaatacaaaaattagctgggcatggtggtgcatgcctgtaatcccagctacttgggaggctgaggcagcagaatcgcttgaacccgggaggcggaggttgtggtgagctgagatcgcgccattgtactccagcctgggcaacaagagtaaaactctctcaaaaaataaaaataaaaaaaacagaaaccatacaccaccctacgatcctaggctactgtgcactgagcaactgagtcccgaggaatgatgggtgtggggccggccaggggtttcacctccgccccacgacactgcctctgagcccagtttttctggagcaagaggcttcatgcaggcccttaagaagaagaagaaaaggaacacaccttacctgagtcacacccatctccaagggaccctggtgaggcactcacaggaccacgcacaccaggaaaaactggctacagctggctgatcgtgcacgaaatctcatgttgcgcccagagcgcctccagatcagccacagagtcaagtcccggttccaaaatgctcacagcacgggacatatttgtcaatggccgtgacacaaattctgaggttctactggcggacgagggcgggaggaaagaagcaaaggactgccaggcttggtggctcatgcctgtaatcccagcactttaggaggtcaaggaagcagatcacctgagattgggagttcaagaccagcctggccaacatggtgaaaccccaggcatggtggctcatgcctgtaatcccagctacttgggaggctgaggcaggagaatttcttgaacccagcaggtgggggttgctgtgagccaagatcacaccactgcactcctgcctgggtgacagcgcaagatgctgtctcaaaaaaaaaaaaaaaataaagcagcaaaggaccaagagagaaaatgactcaacttaaaaagaaggttggtagaaaattccccacatccctgacacacacctgctgctgtctcacaccccaggcagctgccacagccgctgcgccctctctcctgtttcccaatcaacctgcattcctgtcttcctaccagctgggaacttggcacagctgcccatcctgaacgcaactccttccctggggatgtcccgccctccctgcacctctgcacacccacgctcttcctgccttcgagaacgtgcctctgtgcatgggcgagcctgtggccgtgactgtgacccctcactgccaggatggctgctgctgcgacgtcaacacaaagcacgccgctctgccttgtgcttacttgtattttggggggaaagcagccctgccccccaaggcttgcttctctgttgtcatcgccccaaaggacaagggactggtgctgccacttcctgagctacgagcagtaagaatattcaaatctctcccaccctgccatcatggtctggtagccaggctcctcccagggtggcttccacttccctggaaggactggccccacggatgctgcatgggctcaggttggaggggaaggacacggcagggcagacccatgctgctggggccccagtgctgggggcctccctccaacacctgcctaagggatgcccagggcagggctctctccctgcaccggaaactctccctcctttccttgcttcttcctacatccaaattctgcccattcttcaaagccacggtctggagccatcactgaggtccaagtcaggctgaatgagtatttacctgtgccaggtacagtggaaaaggaaagacacgtaacccaggctcgcacacacacaagaacctaaggccctatgacagacaggacgccagcggggaggggccgcttcctccttgcggggagggagccagggtgaggcaggaaggaggtggccgtggccgtgggcttttaaggatgggtgggatctgggagcacgcaggagagagggcatgacatgagcctgcagcagtgaggctggcttggaaacatgcccaggacaaggtttggaagtgcccgtttggaagatgtgggagggcgtcacgggtgggtatctggctccagctcttggactggaaaaaacgtgcgtcaaactcatgaattgtcaactgtcttcaggacagtcggcggttttgaacatgatctgctctggtgtttctggggtgtgtggtcccctcaggcttagacgggcaatagcatgttctgtgtaaacctgaatgaggggacggttttcaaaatccaagttaagtaacggggactgaattttctatcagtccactagcttttaagtcaccaaggtgggattccagaggccagggaacaacttctgcgaagttgaagattagttccacagagtgtcacagccaaggaaggctggatggaaccccagctcttagcagggcacctcaagccaacatggcaaagtgaaccggtcctatttccttgttgatttcagggatgagagctaacagaggaaaaaacaactctgtttccccaccggcctcctctccctctctctgttcccccagcctctctgtccccctgcctctctctgtcccctctctctgtcccctttgcctctgtccccctgcctctctctatccccctgcctctctgttcccctgcctctgtctcccctgactctctctgtccccctgcctctctctcccatctctctctgtcccctctgcctctgtctcccatctctctctgtcccctctgcctctctctgtccccctacctctgtctcccgtctccctctgtcccctctgcctctctctgtccccctatgtctcccgtctctctgtcccctctgcctctctctgtcccctctgcctgtctcccatctgtcccctctgcctctctctgtccccctacctctgtctcccctctctctgtcccctctgcctctctgtccccctacctctgtctcccatctctctgtcccctctgcctctctccgttctcctgcctctgtctcccccgcctctctgtccccctgcttctctgtctcccgtctctgtccccctgcctctctctgttccccctgcctctctctgtctaccctgcctccgtctcccctgcctctgtctcccctgtccctctccacc[142 bp omitted]tcccgggttcacaacattctcctgcctcagcctcccgagtagctgggactacaggcacccgccgccacgccccgctaattttttgtattttttagtagagacggggtttcaccatgttagccaggatggtctcgatgaccacaacaaatcgccacaaacctagtgacttacagccacacacgacgtcttcaacgacatattaaagcaacacaaagtcttcactaggtcagaccctgacagggatcaccccgggctaagattgagatactatgagctgcactctattctgggggttctggggctttcctgccttttccagaatccagaggccacccacatccattggctcacggccccctcctccctccattgtcagagctagcaggcgctggcccctcaacagctatctcttgttctctcttccgttgtctcagctccctgtgaccacagcaggggaaggtgctccgctttcttttttttttttttttttttttgagacggagtctcgctctgtcacccaggctggagtgcagtggcgcgatctcggctcactgcaagctccgcctcccgggttcacgccattctcctgcctc[224 bp omitted]cttgtggataagccaggataatctcccacccccaggtccgtaccctttgtcccatctgcaaagtcccattttccatgtaagggaacagtcacagttccaggggtggaggtgaggggcagccgtggcgggtgctgtcctgcttgccacaggagctcatcacttctcgttattcgtggcagctctgttctagaaagctacctcaagcacagagttggccagtactgagccactgttcagaggggaaacacacagctaggtttctgtgagcctctgctcacaacatgttcatcaaatggtcactatgtaacccagttttgtgtatttcattttttctttttgagacagagtctcactctgtcgcccaggctggagtacagtggcacaatcttggctcactgcaacctctgcctcccgggttcaagtgagtctccagcctcaggcttctgagtaattgtgattacaagtacacaccaccacgcctggctaattttgtatttttaatagaggcagggtttcaccatgttggccaggctggtctcgaactcctgacctcaagtgatccacctgcctcagcctcccaaaatgctgggattacaggcatgagccaccacgcctggacattttttttttttttgagaccaggtcttgctctgtcacccaggctagagtgcagtggcgtgatcatggctcactgcagccttgacttcccaagctcaatcaatcctctggcctcagtctcccgagtagctgggactacaggcgtgcatcaccacacagagttatttttttttttattttttattttttggtatttttgtagagacggggtttcactttgttgcccatgctggtctcaaactcccaggctcaagccatcctcctgcctcagccttccaaagtgctgggtgacaggcatgagccgctgcacctgtcctttatgcgtatttccttagttcatatttactgtgattcacccacactgaactcatggacacggagctatcactcctgcctgagagaactgctctcacacatggtttctctgtgaggctcatcccagcctcctggcactgaggaacacgagacggcactgctgcatgatgctgggaccattctcaacagcgaaatcaccaacaaaatcccaaaaatgtgagaaacatggcgctaaaagcctgcaaatccatgccggaacacagcgtgagagccgggaaaaggcagcgtgatccacgccggaacacaatgcgagagccgggagaaggcagagtgatccacgccagaacacagcgttgagagctaggagaaggcagtgtggctttgtttgacctcggctaggaacatatgcgatgggtgacagattttttgctgctctgcacttgtctgcaaaagactgcaaaaggaatgatttggggctacaaatcaatcttatcaagtaggtgaatttgcacagggagcacgtgagtcctggcccaagctgccctctgcgacaaggctgggtgctaggtgctttctgtgagcgcggcctcactgtacacaacaaaactgaaaacgcaggctccagaggaatttacaggctggaggggatgttacatccgtgaggaggatgcccagcagaagcagagtcctcagagctgatggcgcaggagccccccagttcatcccgctccggaccacacagagctaaccctgagctgggagcctcctccccgcccacttggcttcctggccaaggcccccaggcacatacagcacggtggaggagggttgaaataacacactttacgagtgcgcaacacacgatattgctagccaccggtccaggactttcggtcatgcaaattgaacaggttgtttttttccaggctaggactgctgaaaacctatgtggctatttttctttttttgaaggcagggtctcgctatattgcctaggctggagtgcagtggctattcatgggcatagtcatcaagcactacagcagatgatcatattaagcaaggtaccgcactggagaagctctcagatacatgccacaggggaccgctcactgccaggctgtgtgaaaatgcagaaacttggagactctaaatgtccactggctggagaacggatagacacactgtggaataaccacgagggaaagccacgcagctgcggatgcgagtggagcctcgtgtgtcagtgtgaacggtactcacaagcagtgctcagcctaaaagtagggtgagcaggtgcggtggcttacgcctgtaatcccagcactctgggaggccaaagcaggcagattgctggagctcaggagttcgagactagcctggccaacatggtgaaaccttgtccctactaaaaatatgaaaattatccgggtgtggtggttggtgtctgtaatcccagctactcgggaggctgaggcaggagaattgcttgagcctgggagcgggaggttgcagtgagctgagattgcgccattgcactccagcctgggtgacgagagactccatctcaaaaaaaaaaaaaaaaactagggtacgagaaaccaagcaagaaagcacgtgatcctgttgacaggcagtgtggaccgccacacaaccctgcgtgttttggcgcagtgaacgtgcgcagtgaaggcacgccggccctgctctggcttccttgggatggggtgggggcacctgctcatctgctggtcattcttagctgcctttctggatctgaaaccctttatgatacaaccttcatgaggtgcctgaacaagggaggtgccctgtgccacatactggtgccgaccagcgtgtggcccagggaatgtgttctgaatgcagtaagaggcaacctctcctggaaggagggcgaccccctaccggctcctctgacagccgagtggactcctgggctccagaaacgtgattgcagcaggcagaccaaaggtctttctcctgccctccctcccagcagcactctttccttccgggccccaaagaccctccctggctgtgcagctgcccactatggaaccctcagccagtctagaggtggcacagggaccccactcaacagaggggcccactggtgccttcttctgacaggcacagagtgctctggggctagccggggaggctgctgtgggaaggctgggagtgggagaacactggaaaaatacacaggattctgcaagtatgaaataaaaatgtaaaagctagggcacagcgcagcattccagcggcctccgagccagcctctgcagtgggcagcacatacctcccagacacccacactacgctcagccaggggtccgacagctccaaggctcctcgtgggtggaacgctgacttgaccagagtcagcaagaagcaagatactctgcagttctgggggttgtccttccttcctaaaataatagcagggattctcaaccttagagaaaaccatcagaggcctcaggagaggatgaagatgatcttatgccagggtgggtgaaggttgggagatggggaaattccaaccaggtccctgggctgccctcttctgagccacaaaggctggccttgaagggccagggctgcccatctgtttcaaacaatcgggactctgatgagtgaggctgttaggctgatggatgcctgcctgagtcagctgtggggcctcatcccacagaggcgggtggcaagggattgcggcgagggcgggcagaaagttcccagagcttccttccgcagggggcttcctgagaataagggtctctgcttagtgctggggcaaagtcccgaaatgacagcagaaaaataatcagtcagcagttctgcttccagcacgcagggctggatgggggtgtcctggaggaagatatttgcattactgcttgggtgatgtttgggaactcttttttttttttatttctttttcacttttttttttttttttttggagaacagggtcttgctatactgcccaggcagatctcaaactcccgggctcaagcgctcctcctgcctctgcctccctcagagctgggattacaggcacgagccaccgtgcccaacaatgtttgggaactccttaagaatgctgactgctgggtctccagcttccatgcctttccccaggcactcaggacctggctgttaccaacccatcagccctctttcctgagcccaaatcccagtgtgcaggatcccccgatcctaagaggcgagactgcagagggcatggcggtgggccccaagggaaaaggcaacgtgccttccgtgaggcatttcccacagcgtggcagctaacacaagcataaggcacgtgaatcacgtggtcagaacacaactccgctgcaattccccttctgtatttctttttctttttcttttg[272 bp omitted]gcctggcccctcttctgtatttcttattctggcaagaaggaacttccaggtgggcactactatagtacaggctttgtttttgttttttttaggcagggtcttgctctgttgcccaggctggagggcagcggcatgatgatagctcaccgcagcctcaaactcctggacttaagtgatcctcccacctcagcctaccaagtagctgggctacaggtgtgcaccgctatgactggctaatttaattttttgtacagacggggtttcattgtgttgcccaaatgggcttgaacaactgggctaaagcaatcctgcctcagcctccctaagtgctgggattacaggcaagaatcaccacgtccagcccgaacagctctttcacaagagagcacacctcaggctcaggggtggggtatccagcaaaatttcactctattgttttgctgctgttgtatttgttattccacttactgtgcggggttttttgtgttgttttgtttttgaggcagagtgcagtggtgctatcttggctcaaggcaaccttcacctcgcaggttccagcgattcgcctgcctcagcctcccgagtagcggggat[131 bp omitted]gagttcaagcgattctcccgcctcagcctcctgagtagctgggattacagccatgcgccacccacgcccagctaatttttgtatttttagtagagatggggtt[132 bp omitted]aaataccacgatcccctttaaaatacattttaaaagtgataaaataaaagtaatttaagaggaaagaggccgaatcagctaatgggttcaagctgaaggacaggcgatgaaccctggctgtcatttcagggcatcaccgctggccagctgcctgctgtggtctgcgagtcgtgggagtgtcacatttgaacgctgggacaggggacgcaggcttagaagacaggtacagagaggggcagcggaagcacaggagacagcaggctcagagacagaaggggccatccacagggagaagtgggaggagccgcagggcctattgtggcaatcagagagaagtcactgcagcaactgggcacagaggccagggagagagctgcaggatgggtggccaggcccagccatggcaaaagtcctaagaatcttggcaaacagggctggggagccagtttctggaggctgggagtggtttagtttggggaagcattcaagccagggaaccaccaactctgagcagaccggcccagccgggcagcagcaggtgcatttcagcctggcctcgatcaaggggggaagcaggcgtctgggcttggcttcttagggaccctgctcaggcaggctctgggtcagagactgcctgtgacacagtcaggccctcggacctggccaagttcaggtgactgtcagctgcagccctggagctggacacacaccctaaaccacaggagacactctctgagctgttgattttttcagagcagtcggacctgttcccaaccgagttctccgaggccttgtcagccacctgcctccctggtgctgtgacacggcctggtcagatgcctggccagcggaccaggggctgctgttgagccaccaccagggacaccacaggggccctgtggaggacagcccctcactctgagaaggagccctctagctcagcctctgtagggggcgtctctggcaacctcatcagcaggccagtgcccagcagaacatggcccatcacacatgcccgagcacagcccagcctcaggagctgccgtccgatgggaggagagcacctcacacgaacaccagcgtgtggcatctgggtgggggaccccgaggccagaagctccaagggctgagaactcagttcccacatgcatccccggaagatgccaaggataaggggagatagaaacgcgttcgttatagggcagacaggaagtggagagaaaatgaggttgggaggtaggagaggccggtgacatggacaggaggcaggagagtacagggccccacacagggtgggcgggagggactgactgtgtgagttcccatgcaggggaagagtagcatttaaacctgggaccaaggcaggggctccagaagctcccgaaattcggctgagagcttgaactgtaccctgggccaggtggagacctgcttctcttcctctagggcgtgctcacacaaactcgacacgaggccatccgctgtagggtgggggccacggtggcccatccgtccttccatgtgatatttaccggctccctggggcaggccagccagtaaaccaaacactggggatgcagcaatgagcacaaatgcctggctccggcggcaatgggctcatattccagtggcaacggcaatggaataatcactcccattggcatgaaaccatgtggggagctgtccacttgggggccagggcagaggagacgcatgttcccggcccagggaggggagtgggcccactcaccccatgccctcgcaggcctgatgccatctggattctgagtatctgccatgaccaccgcccctacagactgtgtcacacgcggcatgacccctgctgggtgcttcgtccccttacccaggtgtggaactgcggcccgctaggcgggagccccctcccaggcggtcagtgggccgctgctgagtcaggtccaatggaggaaactgtccgtctatcttcctgctgtggtgaggaggtctccccgtgaccctgctctcagggcctggtcagcaggtttttctaggagtggagaggaaaaggaagacagggccgtcctcccagagcctgagttcagggagccctgggtactgcttaacaggaaatgagcagaaacgcaccaagctgcagtgctcaggaaaagtgcttgccaaatccagccctgcaaaaggcgagagatagagaaagagagagacaggcaggcagacagacaggaagaaggtgtggagaggacagacagagagagaggaagaagaggtgagagggcaaaagaagggagagacagagagaaagacaagggaagagtgagaacagaaagagaggaagaagaggggggagagatagggagaggaggggagagaagggagagagggaaacccgctgcagccctggccaccacattctttcatccgctttccagggacagcttcgaaaaagaaccagaagagaccgccccctgacacttcagctcacacattaaaaagccattagagttggagagctcaggtcctgctgagatgcctccagagcctgttgagctcctgacacctaccccacccccaccccggggcaatgcttccccttccaaccctcccggcacttaaagacctcaggggcttggaaaagagaaacatggaggccgctctgagcttctcctctaagctctgccccgggcagcgccgaaacctgcggctgcctccgaaatcctactggggacgttggcagcatgctccaaattaaacacgacgtttccccagatcagatcagttgcaaaacactggaaacaatcacggaggaggaaaagggctaaggcagcagtgaaggcttggctgtaccctaggcccctggattaaagtccactggacacagagacacaggcaggtctgagcgggacgggcctcaacctgcaggtttctcctttgaggaaaaaatgcaacagacacacacacagacatctgaggggcccagctgccagctcagacctcaggtgcactgcgcacgtgacagcggccacccctgggtggccaggggtggggtgagcagtgtcatgttctctgtgtgcttgataggtctggggtgtcaaaatgtgacagcccccaatttcttcaactgagcggcataaggtgagacacctcatctcgcactcacaggctgttattaggggcacctggaatataattaagtactgcagagctgggctttaacacacacccagataagcagggcgatcagcacccacggagccccaactggtctttggtgaacacgggattctgagtcagagacaaacttttagccgaactttcagcccttgacttgttctgggacctactgtacagcagtcacgggtggcagaaatcggagtctgatgaccccttggtcctggtttgttaagaatgggaaaacgtaggatgctgcttggttacaaagtgcccagtgaccaccaacagccaaccctgtgaagggggccaggtgagccaggtttcacagacaggcccggggagccgtggggtgtaaggagcctctagcttcctttggggaaaggcagtctcaaacttctgtgtctgcacagcccagctggcacacagttcaggcctccacacagctgctggttccacccgtctgcaagccagaaacagagtgagccctgcctgtcctggggtggcccagggtccacgccgccggctccaatgccggctccaatgcctcaaggcacacaccagtacatgccgcacgttcctggattcagtcaccagagcttcctgcaagaacggacttaactccattcccatcatacgtggacatcacaaagcaaagtcccttcctacatctgttgccaacacctccccgagggagagggggcttccggaggtcagcctgcagctgctggactcaccggccttgtcccgggcacagcctctgaatcaccaacgccggcccttaccagcccacacaaaagtgcctctcaactacctgtcactcccagcacaagggtatacacttttatctgtgccaa[135 bp omitted]gatgaaaccctgtgtccactaaaaatacaaaaattggccagctgtggtggcgcacgcctgtattcccagctactcaggaggctgaggcaggagaattacttggacccaggaagcggaggttgcagtgacctgagatcggcccgctgcactccagcctgggacagagcaagactccgtcacacacacacacacacacacacacacacacacacacacacacacacacacaaaagatcattccatgtttatggcttaacaagtcaagcactttggtaggaaaaccaagagtggccccacaaagtgaggttttaaaaaagaggtcagggccgggcacgtggctcaggcctgtaatcccagcacaatgggaggccaaggcgggcggatcacctgaggagttcaaaaccagcctggccaacaaggcgaaaccccgtttctactaaaaatacaaaaattagctgggcatggtggcaggcacctgtaatcccagctactcaggaggctggggcaggagaatcgcttgaactgggcagcagaggttgcagtgagacaagatcgtgccactgcacaccaccttgggagtggggacagaacaagactgcatctcaaatacgtaaaattttaaaaaatcataacaacccgggcgtggtagctcacacctgcaatcccagccctttgagaggctgaggcaggaggatcaccacctgaggtcaggagttcgagaccagcctggtcaacacagcaaaacctcatctctactaaagatacaaaaatcagctgggcgtggtggcacatgcctgtaatcccagctacttgggaggctgaggcaggagaattgcttgaacccaggaggcggaggttgcagtgaggtgagattgcgccactgcattccagcctgggcaatggtgtgagactccgtctcaaaaacaaaaaaaacaaaaataacaaaacaaacaaacaaaaaaaaacaccatcataaataaactaaaaaaaggtcagggccaagcacagaggctcacgcctgtaatcccagcactttgagagaatgaggagacaagatcacttgagtccaggagttcaagacctggagtggtggggtttaaggagcctccagcctaggcaacatagtgagactcagtctctacaaaaaaattaaaaaataaataaaaataggcgaggcacagtggctcactcctgtaatcccagcactttgggaggcc[268 bp omitted]ataaaaataaaaataggtcagaacaagcagtatcgttgacattctgaaacaccagccatgtcccagacactgcttactctgacctacagcccccaaataggtggggcccaggatcccccggcagacagtcctcccccaacccccctggcctctccttttctcctaggcacaaacccagggcctaaggagcatcaggcagatttcaaagctatgggaggtgacgcttgtgaatgtccctcctagctcagtctgaagcaatctttccattcaaatgttcaaaccctctccctcctttcaggcaaaaaaaaaaaaaaaaaaaagccagcattccaggcagctgccagctctacccctagttacactctcaatctcacacagcccggccacaagatttatcaggaagccagttagcagcttaagcctggaaataatgtcacccaaacccccagcacaccaagggaacttctgagagcagctctcgctagcggcattctttcaccctccttagtcccccagttctagctgcgcacggatgccaggaggctcttgagggagtgggtgtcacacaggcagaaaggagggaaccagggagatgggaccatgacggacggctttttactgctttcttccagatgattcaactttccccagctcaggccctcaaccagtctatggccagttcatgacaagaagtaaaaactcacaaactgcccactcaagcccaaaccaattttgaacaagttcccaaaaggttttgcagggagatgaactagcctggaacccactaaggttcttaccattatcaccaacgagagatcagaaactcagaaccaacaacacagcctcgcctgttagaaagtaagtttatcttttccagcactctctcccgcatcctcccggcctctgttgatcaatttagaaaggacaccgtaagaacccttggaagtctagagcctggtttaaagcagggtttcttaagctcaactctactgacgtagggctggagaattcttcctttgcagcggggggaagctgtcctatgcattgtaggatgcttggcaaccatccctggcccctatcccctcgatgccatgagcattctctcccaaagttgcgataacaactgtctccgacattgccaagccaaggaaggggtctgcgccatccccggctgacagcgctgatgggcgcgtgcccctccttcaggagccccgatgcctgtggctctcaactattaaatcaagttccagcaaagaactggaaacctttaagctgtgtatggaaccattgtgtgtagcactggaaactgtcccttttctaagtcactgtaaatggtgtttttttttggagacagggtctggctctgtctcccaggctggagtgcagtgctacaatcagggctccctgcagccctgacctcctcaggtgcaagcgataaaggttcctcgtgatcagctggaaggtacttttgaattaaaggttcacactgaagaacctaagtggatagtggcatttgaggccagcagtgaaagtgtttcctctcaaagagttccctacacagcagcagacatggttattctgagagtcatgtatgttctgtgtttctctgtgaaccatgtttcagtctttgtttctgtcatcatatgtacgggaaattccatagagactacatcacacaaaactgacattgtcaattaccaggaaatacaggtgctcaccttttgaaggcttattcatacatatggttgccacaatacgtatatatgataaacagtgtatgtatacatacaagttgtttaggccaggcacggtggctcacacctgtaatcccagcactttgggaggctgaggcgggcagatcatgaggtcaggagttcaacaccagcctgaccaacatggtgaaaccctgtctctactaaaaatacaaaaaaaattagccgggtgtggtggcgcacctgtaatcccagctactcaggaggctgaggcaagagaatcgcttgaacccgggaggcggaggttggtctcagtaagccaagattgcgccactgcactccagcctgggtgacagagcaagactctgtctcaaaatatatatatatatatacagttgtcacaatatgtatatgataaacggtgtacatatacacataaaatgtttatggtggatctagctcccccctaaaaaagaagcccagatactgaaagacactcgaattttcctaaagacttgagggtgggctcgaccttagggtctggatgctgagttttatgtaaatatctacctgtggggcggggtgccatggctcatgcctgtaatctcagcactttgggagactg[136 bp omitted]gaggcaggagaattgcttgaacagaggaggcggaggttgcagtgagccgagatcgtgccattgtactccagcctgggcaacaagagagaagctccgtctcaaaaacaaacaaacaaacaaaaacaaactacacatgtggctatctgtgtttagcaaactaggaaaatctttgttttattttatattttactttttttttttttgagacgaagtctcgctctcatccaccaggctggagtgcttcccaaactgctgggattaaaggcgtgagccaccacacctggccaaactaggaaaatcgtaagaatggctcagtggggatttttttgttcctttgttttggtataattatcctcattttttttccaaatcttcaagcagggtttctcaaattttggtactattgacatttggggccaggtaattcttgggggcagtggggagatgctgccctgggcaccggaggatgtccagcaatatcgtctacctactagtagccagcagcaccgcaccaagctgtgacaaccaaaaaggtcccagacattgtcaatgtcccctggaggacagaactggccctgttttacaggaagataaatgtcccctaatccttttgtgtaaaagggggaatgttttttacccttagaccggataagcaagaccagctgagacctactggtataaagcatactgcctgctcacatggtgagaactcaataaatgtttgtatcactacgtaatgagagatcccgagagatgtcactttccaacaggcacagcagagggtgaaagagttgttattagactaaaaacaaaaaaagagacacaaatagtcggatacgtccagataacagctgagatgtcagagggaaccatggcaatgatcacagaagagcatggaacgcagccagggtgacttctaagagcacgactcaggacagaattgaccaggaggccaagacgacagccccgagggtgggctgtggccattgtgctttgggactaggcctcgggatgtggaaataggcaatcctaagcccagctaacaccacactgtcctttccaggcttcaaggcgccattcacagatctgaacgcaggtcatcctgcttcccttgagagagacaaagtcctggtggccggcacaagaggcctggttcattcctctaaagagggtgtcagctcaggacaatatgggcacaggccctgatcgctgggagtgggggtggtggcttccagagacctgtctatagcagggaacaaagtggcccaggaattcctccaagacctctgaggacatctttcctgctagggagcagtactctatggtgctctaaccaagcaggtgaaggtctgacgcctgctgggcaaggtctaacccagggccaggccatctgatttcaaagtgctggggcaagggggtgggactgttctcagtgacaactctaaaattcgtctggattaaatctttctccagggtttaaccatcatctggggtgtagagatagaccctaagtatctatatccctaaacaaccactagggttgttactttttttatttattttttgagacagggtctcactttgctgcccaggctgaagtgcagtggcacgatcatagttcactgcagccttgaactgctgggctcaagtggtcctcctgcctcagcctcccaagtagctgggactgcaggtgcacatcaccacacctggctaactttttcatattttgtagagatgggatctccctatatcgcccaggctggtcttgaactcctgaactcaagggaacccctgcctcagccttcaaagtgctgggattacaggcatgagccacagcacctggcagggtccttacttttttctttccaggggcaaaggtacctgctgggtgttactggggactcgtttctctttgctcccactgggcatctccgaactgtgggcagagaaccctgtttgccaccttggcccaagcatttgctaagatcattgctcattcctcggtggactctatctacacaaattccacacaacctcaccctgcagtacacggaccaataggattcaacaatctgaggcttcttgtctttttttttttttcaagacggagtctcgctctgtcacccaggctggagtgcagtggtgcaatctcggctcactgcaacctctgcctgccggattcaagagattctcctgtctcaccctccttagtagctggggttacaggcaaaaatacaaaatttttgtattgttagtagagatggggttttgccatgttgcccaggctgctctcaaactcctggcttcaagtgatccgcccgcctcggcctcccaaactgctgggattccaggcatgagccaccgcgcccggccaaatttgaggcttcttgcattcgaaattgcaaagtgaaaattttaaatgtgcccagttttctggagagtggatccacagctttcaccagattcatgagcagtgggccctggagtttccaaaaaaaaccctttatctgtccatatcaaatgcacttaggctgggatgcagcattctacttctgggaattcatcctataaaactaatcccactggtgagcaaagatattcactggctatttattgtagtaatggtaacagaaaattccggtaaacaatagagatatctatcaactgacaactggttaaataaattatggtatatgtcatggaatgaaatacaatgtacccattaaaaagagccaagtaggccaggcaggtggcttacgtcgataatcccagcatgttgggaagccgaagcaggcggattacttgaggccaggagttcgagaccaccctggggcacatggagaaaccctgtctctgctaaaattacaaaaagtagccgggcgtggtggcgcatgcctgtagtcccagctactggggaggctgaggcaggagaattgcttgaacacaggaggcggagcttgcagtgagccgagattgcaccactgccctccagctggggcgacagagcatgactccctctcaaaaaaaaaaaaaaaaaaaaaaatccaagaagtgtggagtatggtctagagcagtagtcctgggggacaggaaaggaagggaggaaggaaagaagagaagggagggagggagagaggcaaggagggagggaggaaggaaggaaagaaggaaggaaggaacgaagggagggaaggaggactgattctaaggggacacacggtgatgtctcaagatatttttggttgtcacgacttgggggtgctcctggcccggagtgggtggaggccaggggcgctgctcagcaccccgcagtgcccaggacggccccaccacggagaacaatccagccccagatgtcaacagtgccgacggagggggagaaatcccgctccagtgtgatctccaagcaatgaaaaacacagcacacaggattctgtggcatatgctatcacagggtacgtgtttttaaaggaaaggcacacacgtatcttaggaaagggacatacggagtcgatgacagtcgcttgtctctggggagaagggctggctgcccgaggagcagagaggggaaactgacttcttcctctaccttttcaactttgtaccttgcccatccagaggattttgaacgtaactgctctagacgcaacttttccctggctctgggttatctggcaagagtcctgtgtcgacagcctcgggactcctctcttccccttctctccccgcaccccgcctttgcagcggagagaaggaggggagaggtccgcgtccctgggcagcccagggtgcctctcccctcctcccaggggctctgtccccgcttctggagcccgcatggcgggcagggcctgggccacctcgtcgcccccgtccgtcccttggtcttcccacctggcaggggacacgcgccaacgtccccacctcggtccccccggccccctcccgggccaggtcgggcctggctccctcatccgggcagcccggggcccggtactcggctcccgcctgggcctgcgctcacctggctcgccttgtagaactgcttcttcagccccgccaccgacatgctgccgcccgccgccgagcctcccgcccggaccgcgccagcgacaggctcccgggcgccgccgaccctctgcgcgcctcagcagtccccgtcggcgccgcctccgccacccgcttgccagctccgcgcccgccccggcgccgcctcagccgctcgcgcgcccgcgcggccaggatattacatggcaaccgcacgcttccggtgccggcccccgcgcgcgcccccggcccccgcgcgcgcccccggccccgtctgcgcacgcgcgccctctgccggctgaagagcgcacgtgcacattgtctaccgcgggagaggccgcctctgtcagtgagttgagcggggcgagcctagaggggccgtagcagttgcagcgccccctggagtcgtggaggtgaccctaacgtcttggaaaacgcgcttagtttaaacctggccagggaggttgggaagtagaaggggcccctgcttacgattcttcagattcctgtttactcatcttagctaaatccagttcgtctaagtgttcagccccctcccatttttatttatttatttattttttttttgagacggagtcttgctttgtctcccaggctggagtgcagtggcgtgatctcggctcactgcaacctccgcctcccgggttcaagcgattctcctgcctcagcctcccaagtagctgagattacaggcgcgcaccaccatgctaggctaatttttgtatttttagtagagacagtgtttcgccatgttggccaggctggtctcgaactcctgacctcaggtgatccaacccccaacccccccaccaaatccagcctcccaaagtactggtctcacaggtatgagccaccgtgcccggccacctctcttcctctctctctctgtcctgtgttcatccattcagttgcccacgtgacacatctagacatctaggtctgtcttcatgccttgaccatactttccaccagtcctcccctccaattcttcc[140 bp omitted]ggtgaaaccctgtctctactaaaaaatagaaaaaattagccggacgtggtggcgggcgcctgtggtcccagctactagggactccgtctcaagaaaaaagaaagaaagaaaggaaggaaggaaggaaggaaggaaggaaggaaggaagaaagaaagaaagaaaacctgtttctacactcacaggctgacactgaagttctctgttttgtgtgaggcttttaatctgcttgatctacacagttcaatcaaatatttatacattcactcaaacatttattgacctggtaaatatgatcagttactaacaggtcctggggttccagtgaggaatgagtcctaccctcgccagaactaatgacaaaaggcagaaattaattcattagtcaaataacaaactaataaatagacacagctgtaattgctttaaggaaaagaacagtgttgtaggcacttgatattgtcagggttggggaagaaaaggcttcctggggtgacgatctaagatctgaaaagtataaattagccaggaaaagagctgcgaaaagattgttctaggcagagaaaacagcatgtgccaatttcctgaggattaaaccagaaacgatccatttcgtccatttcgttcactcattctacatgttatttactgaatgtcaaatacttccgaagcgctccccagacttcgttttattgttcttgtagaaagcaatttataattttaattgctgttgctatatttagccgatgtcccattaggataaactcaaaactccaggttcctcatctaaatcccactttcaagttgtcatctgcgccttgcgtaaaatgttctggtgacgtaagagcctgggcctccctcctcttagggactatcccacgcgatcagccagtcgcagcgcagagcaatgagcttgacacctccttcctccaatcgcagggcagctcctcccagccaatgacaggcctccgaggggaagcccagtccctcgcggatatgtcaatgggcgagccctgggaggaatggaagtcacggatctcgcgaggatgcccccggcgcccctcaattcccgaggcgggccgtcacgtgacccgggctcgcccaattggcgcgcggactgcgggggtcgccgcggttcccgccaaatacgagcgcggcggccgcggcggcagcagcggcgcgggcgggagggcgaagagcagcggccgcctgaggggagcccgcgcctccgccgcctgagaggaggtcgagctgccgccggggcgatgctggaggagctggagtgcggggcgcccggcgccaggggagccgccacaggtcggttcgggcccgcgccgaggggaagggggggcgcggcgcgcggcctggacgggccgaggcggcgatgggaggcggacgggcctccgggcgccaagcctggtcctgcgggccgggcgttcaccccctggggccttctcatccccagcgagggcctggcgtccccaagggcacccttgttgacgttattgttgtagccgcgaccatattgtttgtttccggcgcttttgcgtcagttcgtccctccaggactctctggggcggtgggtcggaggggccgagaggggaaactgaggcccagggaagcgaaagggcttgccctgcaggttactggatgcgtttgtgtcccttgaccatgttggaccttgcagcgggtggggaaactgaggcccaaggtcgcacgggctcggggaccagtaccgatgccgctgagggtcggggtaagcccgggtaagaagaggcccagatggtagagatggccaggagggtgggactcccgagttcttgctccttcctgatatgcaccgtgacttcctcctccgtgtgccttggaatggggtctttggagcccaccacaggcctcctgaaacgtgggagggtgaaccaaggaagaccagactgtccctctcccttgctggactctgcattacataacgctttggcagcacttggcattacgctttggcacatagtaggtgctcagtaaataacgtgaacgaatgaagggctagaatggacgccagtccagtttctcagcctcagcagtgttgatatttgttgccgtcctgggcacggcactgcagggtgttaagcatcatccctggcctccgccttttgcaggccagtagcagcccctctcaccatgccttagtaacagccagaaataccattgccctgtgtcccctatggggcagattccgccttggctgaaaatcatggctgtagttccttctagcctgtgggatttcccggagacataaaattaatataaagttggtactgtcgtggagctgtgatgttttaagtcaggatgtttaactttatttatttatttattttgagactgagtcttgctctgttgcccaacctctgcctctctggttcaagcgattcttctgcctcagcctcccaagtagctgggattacaggcctgcaccaccatgcctggctaatttttgtattttttagtagagacggggtttcaccatgttgggcaggctggtctcgaacttctgacctcaggtaatccacctgcattggcctcccaaaatgctgggattacaggcatgagccaccatgcctggccaggatatttaactttaaaaaaaaaaatcgctactcgctaggaccatgctatcatgaaaggaaagtatattttagtgccaaataaaattagaaaggatgtaatcgcagaataaagagcagttagtaactttatacacacatatgtgttaatcgtgtgtatctttggatctctggattgggagtgtcccgttttatatacaagattttttaatgagggtgggtcctgtttttaatgaggttgtttctgttccacttgcaccaaagctagtgactcaaagccacacaaatagatttttgtgattgtctcgaaaataaagttaagtgactaaaaatcatatccttcagttagggggtagaaatccatggcttttggtaagtggacacttgagaatgatactgtctttatttctttgaagtggctagaaaggaaacatgaattttctcagtaccttttcttattcactaagcttggggcggtgggtgaggggtggtttcatgtatggacgatggagttttttaggaagccccagtctgcttttaaaaagtactcacttttatgtaatgcttacaaaacatacgtagattaaccaaaataactaaactaggttttgccaagccagatctcctggtaagtgtgagcttcctaaacttactctgtttaaggtatttatctaaagactcgcttctatttatgatcactgctgcatctgctttgatattattagatggtttcttgagattttttttgcaggaaaatattttgtcttatcttctcttgacagcacttcagctcctgcctggcaagctcaaagtgctttaaattgtggtaccttcatgaattctctttaaaaagaaaaggatcccttttctgattttacagatttggtggtggtatgggggcttgggttggaggaagatgtttggggatcatgggaatgaaataggtaatctgatgttttctctcctccctacttttactcattccactttcatttcatgaaacagttccggttactctcttagttggctttctgatttattccagaccctaaccaggtaccataggtgcagcatggaacaagtctttctgctgtcatagagttggcattttgtttccagagagacgtaataaacacgaaagtttcagattaaatgccacaaagaaaataaaacaagacatgacagtgtctagggtaggatttctcaacctattaacattttgaggccaagcgccgtggccagcactttgggaggctgaggcgggtggatcacgaggtcaggagttcgagaccattctggctaacatggtgaaaccccgtctctgctaaaaatacaaaaattagccgagagtggtggcatgcgcctgtagtcccagctacttgagagagtgaggcaggagaatcgcttgaacccaggaggcggaggttgcagtgagctgagactgtgccattgcactccagcctgggcgacagagtgagactctgtctccaaaaaaaaaaaaaaaattttttttttttggcccatataattcttcattgtggtgtgctgtgcattgcattgtgggacatttagcagaatccctggcctctacccactggatgtgaatagcatccctttgagccctccctgcatcatgacaaccaaaaacatctctagactgtgtcaaatggcccccgaggacagaggggtcagaattgcctccaccttgtacataattggctctacatatgtatttgctaacttgattatttgcagaatttaacagtttaccctttgacacttttatttgcagccatggattgcaaagatagaccagcttttccagttaagaagttaatacaaggtaattatttggaaatgggttaaagagttgttcgtagtttatagtcttccttgtctcttgttggagacctcagtggaagcctggagctagaggggagagaaacagtccttcttcagaccaggaagctgggaaaatgcttttcacacagtaatgtctcgtggggttcccacaagtaaaccccgaggcctccacttatgcacgattggtgttttgtaacttgcagctgggagctctcctgtatgttgtagggagcgtagcagcatccctggcctcttcccaccggatgccagtaagtgcatcctccaagtcgtaacaaccaaaaatatctctatacgtggctgatgtcccctgggaggtagaactgccccctcagagaaccactgttgtcctggaagataaatgctcccaaatccttctgcataaaacggggagtgtgttcacccttgggccagatgagcggttggattgtaatttttttttttttttttttgagacggagtctcattctgttgcccaggctggagtgcagtggtgcgatctctgctcactgcaacctccgcctcctgggttcaagcaattctcctccttcagcctcccaagtagctgggattacaggcgcgtgccaccacacccagctaatttttctatttttagtagagatggggttttaccatgttggccgggatggtctcgatctcctgaccttgtgatccccctgcctcagcctttcaaagtgctgggattacaggtgtgagccaccgcacccggcccagattgtatttttagaaactacagttttgggtttttcaaacttgggctgggtgcagtgttgcatacctgtaaaaccagctatttgagaggctggggtgggaggagtgcttgagtccaggagttcaaggctgcggtgaattataatgacaccactgctcttcagcctggatgacagaggaagactctgtctcttgaaaaaaagggggacgccagatgctaggctcacacctgtaatcctagcactttgggaagctaaggtgggcggattgtctgagctcaggagtttgaaaccagcctggccaacatggtgaaaccccgtctctactaaaatacaaaatagctgggcatggtagggggcacctgtagtcccagctactcaggaggccgaggcaagagaattgtttgaacccggaaggaagaggttgcagtgagccaagggtgcgccactgcactccagcctggtgacagagcaagactctgtctcaaaacaaacaactccccccacaccccccccaaaaaaaaacaggtttttatttggtctattacatgatgaaatagttaataaaagatgcaatggcattgaagtaagtgaacataggttctttgggaaattcactctccaaagtgtttctgtgttcctcctaaccagcccgaagcctggcagactctgggagaacagtttgattgatgagaaaagcctaacagagcctagggtgctgaggccaggagaaaaaaaaaaaaccctgtccacaaatgtgtctatattttctacttgagaaccagatgcagttattatcaaatgagattttcacccattaaaaataaatttggaatatgaactgcatctgaaataaacaaatgtctcttgaaattctggcgatggctctgctaaaaggcttgtcaggattttgttttttaagttaggatgttgaagcggggcatggtgactcacatctgtagtcccagcaccttgggaggtggaggcgggcagatcacctgaggtcaggagtttgagaccagcctggccaacatggcgaaaccctgtctctactaaaaatacaaaaattagctgggtgtagtagtgcatgcctgtaatcccagctacttgagaagctgaggcaggagaatagcttgaacccaggaggtggaggttgcagtgagctgaggtggcgccattgcactccaacatgggtgacgagcaagactgtctccaaaagaaaaaaaaataagtaaaattaggatgttagaaaaggatagaatgaaaagatagcaccccccaccccctctttttttttgagacgaggtcccttttgcccaggctgcagagtagttgcaccaccacagctcactgcagcctctacctcctgggctcaagcgatcctcctgcctcagcctcccgaagtgctgggattatagatgtaagtcagtgtacctggcttcagatagcccctgccccgtcttttttttttttttttcttttgagagtttcgctcaggtcgcccaggctggagtgcagtggcgtgatctcagctcactgcaggctccgccccccgggttcacaccattctcctgcctcagtctcccgagtagctgggaatgcaggcgcccgccacctcacccggctaattttttgtacttttagtagagacggggtttcaccgtgttagccaggatggtctcgatctcctgaccttgtgatccgcctgccttggcctcccgcacccggccttttttttttttttttttttttttttttttgagagggagtctgtctctgtcgcccaggctacagtgcagtgttgggatctcagctcacttcaacctctgcctcccaggttcaagcgattctcctacctcagcctcctcagtaactggtattacaggcgtgtgccaccatggcctggctaatttttgtagttttagaaaagacggggtttcaccattttggtctggctggtctcaaactcctgaccttgtgatctgcttgcctcggcctccccaaagtgctgggattacaggcatgagccaccacacccggcccagatagtccctttttaaactttaaaattatctcccacccccatgtcccaacaaatcagtaattttcaagctcatgagtggttgtaactttaaacgttcactagagatggctttctgtctttgtttcagcccgtctgccgtttaagcgcctgaatcttgtcccaaaggggaaagccgatgacatgtcagacgatcagggtacttctgtgcaaagtaaaagccccgatttagaggcctctttggacaccttggaaaacaactgtcatgtgggttctgacatagactttagaccgaaacttgtcaacgggaagggtcccttagataactttttaagaaatagaatcgaaaccagtattggccagagcacagtcatcattgatttgacagaggactcgaatgagcagccagacagtcttgtggaccacaataaactaaattctgaagcctctccctccagggaggcaataaatggccagcgagaagacactggggatcagcaggggttgttgaaggccattcagaacgacaagttggcatttcctggagagaccctttcagacattccttgcaaaacagaggaggagggtgttggctgtggaggtgcagggaggagaggcgactcccaggaatgttcgccacggagctgcccggagctgacgagtggcccgagaatgtgccccagaaaggagcaggacagttggagtgaagctgggggcatcctgttcaaagggaaggtgcctatggtggtcttgcaggacatcttggctgtgagaccaccgcaaatcaagtcccttccagccacaccccaaggcaagaacatgacccctgagagtgaggtgctggaatctttccccgaagaagactctgtactcagccattcgtccctgagctctccctcttccaccagctcgcccgaggggccgcctgctcccccaaagcagcacagcagtaccagtcccttccccacctccacgcccctccgcagagtgagtatctcccatggagtccctgcacatcagtgctcacggatctcagagcgctgtcagtctccactgggtcacccaggtgttttgtggcagagtgagcggggccacgggctgggtcctgggactcgacgtggagttcttcctggtatcaaaactcacagtgttcagttctgcattcgttgtgatgcccctgggacttaattcatcaacagtgtacctggtgtactgtgtgaataacaccctgctgttttgccttcgttgttcacatctaatcagtgatagcttagccgttttagggaattaggatctgagctggtgctgtaacccctcacttcagattcgaggtccagctttctctgtgcccttcctgtctaagcatagaaatgtagggacggggctgcaaagacactgagcactgaagtggcagtgagacggcaggaagcatgacttggggaattctgtagggtcagcacagccagccatcttaaaaaccttacctggggccaggcacagtggctcatgcctgtcatcccagcactttgagaggccgaggtgggaggatcgcttgaagatcacttcaaaaccaacctgggcaacatagacaccatctctatgaaaaaaaattacttttttttttttttttgacagagtcactctatcacccaggctggagttcagtggcgtgatctcggctcactgcaacctccacctcccaggttcaagcgattctcctgcctcagcatccctgatagctgggattacaggtgcgcaccaccacacttggctaatttttatatttttagtagagacagggtttcactatcttggccaggctggtcttgaatttctgacctcaagtaatctgcccgtcttggcctcccaaagtgctggaattataggcatgagccactgcacccagccctgcaaaaaaatttttaaaagttatccaggcatggtggcacatgcctgtagtcccagccacctgggaaactgaggcaggaggatcacttgagctgaggagttggaggccgcagcgagctatgatcacactgccgcgctccagcctgggtgacagagcgagaccccatctggaaccatttttaaggaccccataagggggacttttgcatggtctgtctctgttattgattttttattagcacaatggtgtccttaaggtcttagggaccaaactgataaaatcagtcacgagtcccacggtgtttagtggtgtcttttgattttataattttttactttttatcttaagtatgtagaaccagaagagacagtgcctttttatgtttttggttttgtagcacttttgtttgttcatgttgggtctttatatgagagtagtagatcctgagatgggtcatttaatctgtacctgtaagcaggtacagtagaccacctggaccataaaccaccaaccttgttcgctttcgggattttgagctctaaggaaccatttatttatttatttttgagacagagtcttgctctgtcacccaggctggagtacaatggcgccatctcagctcactgcaacctccgcctcttgggttcaagcaattctcctgcctcaccctctcaagtagctgggattagaggcacccgccaccatgcccagctaatttttgtatttttagtagagacggggttttgccatgatggccagactgatttcaaactcctgacctcaggtaatccacccgccttggcctcccaagtttctgggattataggcgtgagccactgtgcttggccaagagcatttatttttctgaatgacttcatttcttgtctttcacctgagaagatgaaaaaggaaaaaatggcttcctctttaggtttatgaaatgttgtaaaaatggtgcaaatctttttttttttttttttttttgagacatggtctcaccctgtcgcccaggctggagggcaatggcatggtctcagcctactgcagcctccaccttctaggttcaagcgattttcctgcgtcagcctcttgagtagctgggattacaggtgcccaccaccacgcctggctaatttttgtatcttttcagtagagacgggtttc[133 bp omitted]atataggtaaactcttgtcgtgggggtttgttgtacagattattttatcactcaggtactaagcctagtaccctcttctaagttactaaatgtgccagactggcatgtacacatttcagcttctacctaatccaccactcaatctcccaaaatcagagttgaagtctctccccattgggcatcctgtagtgtacattcgatcacttgaatttcttccaggctgctgccgctttgcaaaatttcgtcctgtgatgtgagccatttagcaagaacgggacacatggctgggcgcggtggctcacacctgcaatcccagcactttgggacgccgaggcgggtggatcacctaaggtcgagagttcaagaccaggctgaccattatggagaaaccccgtctctactaaaaatacagaaaattagctgggtatggtgacgcttgcctgtaatcccagctacgccggaggctgaggcgggagaaccgcttgaacccaggaggcagaggttgcggtggcctgagatcgtgccattgcactccagcctgggtaacaagaacaaaactccgtctcaagaaaaaaaaaaaggacaggacacaagcacatgtttccattaagtttgtttccatgtccacagcttagtctgcaaactgggaagtcccctcgttgggcatcatggtggcacaatcctgcccgctttctaaaacaactgagcacatgaacccagtgtgcaacatttaggaaaccctgcatttaggacgctagatcttgttctgaacacagactcgaggttttgggatgcacttgaaggcaatattatcccaacttttcagataatttacaagtggtaaaggcttcaggctggcccagagcctatggcagaaagcggccacaaccacccgcagagggcctgtcagtcaccgaagctatgagggaagcgattatcgggaggcctcctcatgccctgatggcagggatccctgagatcccagctgagagagactccatccccaacccctactttatctccgaacctttaaggagtcctgcatttctggtttggttggtttgcttgcttcatagttggtacctaactcttttttattttttattttttttgaggcggaatctcactcttttgcccaggttggagtgcaatggcgtgatcttggctcctgcaaccgctgcctcctgggttcaagcaattctcctgtctcaacctcccaagtagctgggattacaggcacgcgccaccaggcccagctaatttttgtatttttagtggagatggg[135 bp omitted]ttgccgtgacgtccaagccacccccttcccacaacccctgttcctctggggaatacactgtttttgcactttacctccctaccagcagctctttccagattgcaggggcgagctggtgggaagcttgcagattgtttcgcactgccgtgtaatctgtgtgcttgtcactggggtctgttcttccttgagttggtacagtgaaatatgcattgagagtcccagggcagtcattgccactgtactttgtgggctggcttgccttctttattatttcttctttaaaataaaagaaaatgggagtttgttccgatacaggtcctgctgtccctttgcagggagcttcatggcgtgtttttgtttgttttggtttttgttgttgttttagtactgcaggatctggagaatctcactttggagaaacaatgatttaaaaagatccccctttagatactcccagggtcctttgaatagctgaagtgttcctttttagtattagagttttctaccatgtgggaaagaaccatttctgaagtttgcaatcagacttgtgatttagcctcttctgttagtgatcgagatgattatttgacaaatgatcatgttggtgcagttgtgttactggaatctttggcttgcttctgtgcccagattgctggaacttctttccatatacttgaaattacatttgtaataaattctccatgtttaaaagaaatactggtctaggtgcagtggctcaagcctgtaaccccagcactttgggaagccgaggtgggaggattgcttgagcttaggagttcgaaaccagcttgaccaacatggtgaaactccgtctgtacaaaaaatacaaaaaatagcggggcatgggggtgcacacctgtagtcccagctccttgggaggctgaggtggaaggatcacttgagccaaggaggcagaggttgcggtgagtcatgattgcaccactgtgctccagcctgggcaacagccagaccgtctcaaaaaaaaaaaaaaacaaaaaggaaaaagaatggaaaccttgaagccctctgttctcccaggaggttgccattattatcatcatcatcaccttgtgtttttctgtgtcctgtatatccagagagatctctaggaaacacccagtatcattttgtttccttgtgtatgacatatactgtaaatatctgtctttgttactcaagggtgtcttagatgttttttatattgggatggaaagatggagctctttttaacagctgcgtgatatcccatggtgtggacatgctgtaggttacagagctgttttctcagttctgctgtttctgtgcttggctttcacaaaatgattgttcccttgagcttccttctacaagtggccttgggctgttaaggagaatgaggtcttggtagctcaaggcaatgcgtgcgttcttattttcccagcttgcactctctcatgcttgggccaattggaggttttctcttttcccccctgcctccgctcccctgctgtcaggttttagcggcttatctggtctgggcttagaaattagataccctttagtataaaatcagagtccataggctctgagaggattatctgagaaagggtgcaggaattttcatgcccacacatagtgagctctgtcgcgactccttgggattgtcggtttttgtgttttggcttccttctgggatcctggatcacgtttttggcagttgagggtgctgtctgaccgggctccagctgggtagaatgtgggagtgttgcatagaattttgagagtgagatctataaacacttgggtcaaatttcaagaagataaagttctgtcagacttcaaggtccatctgagggtttggcaaagcaaaaaagataccagttttaaattaagcagtaattgctctgttttggttgttggatattactgagcgggctcttgccagtcacatcaagtctgttatctctggactcacagcagagggggggcattgtaagaggcaggagattctgcagctgagcttcaggcatgggcaagactaaggaactgaattccccgccaccccaagaccacattccgtattataatctctgaacacaaagggcagccccggagagctgcggctcccatattctgcagttaaatccctcagcgtgggggagaggcacacagccttggcaggcagagtagatgctggagagacagatgctttttctgcagcatttggtgaggctgcctcgggctggcatttctgttgccacattctcagcaaagactgaacaccctggcctgatctcggtggtgaaagagctcctgccaacacgggcagccttctcacaacggctcggcctttccctaaagaaaggtttagtccagaaaggactcagtgggacccaggtggaaaggctgtcttgagctcattcatctgaagcttttattctgtgagaggtcctagtcaggggttcagc[170 bp omitted]ggtggtgggcacctatagtcccagctactgggcagactgagg[139 bp omitted]accattgccaggaaaatgggcctttggtttttcagtcaacttcagtcttacactgcaagtctgcaatgaacccggagaactatttcttcccactcttaagcgtctcttcccattgctcttcacttctactagtttggttttcaggattccctgccccggtgggagatagcttaggccaaagtccagactccctgttcgtcttccttcctgggaccatttaggtggatggtgagtcacaccatggatcctattggtaattcctagtagctcatgctcagtttgaaggtaggtgatagaaaatattgtgccctagaaggtagaagtcctagaaaaccccagcaagtttcccttttgtcttaagctttcactccacattctaaaaagcagagttggctgggcgcggtggctcacgcctgaattcctagcactttgggaggcgaggcgggtggatcacctgaggtcaggagttcgagaccagcctggccaacatgatgaaacccctatctccactaaaaatacaaaaattagccaggtgtggtggcacacgcctataatcccagctactcaagaagctgaggcaggagaatcgcttgaacttgggaggtagaggttgcagtgagccgagatcgtggcactcgctgcactccagcctctgtgacaggagtaagactccatctcaaaaataacattaaaataaaaagcagagttgagctagacagaatgtaaattagtggtgcacaggaaaccagcctggagacatgttttatttgattaatttagtatctttttattttttttttagacagtctcactctgtcacccaggttggacagctcagtgcagcctcaacctcccgggctcctcccaccccagactcctgggtagctaggactacagatgtgcaccacaacacccgactaactaaaagctttttttagagacagggtcttgctttattgcccaggctggtcttgaactcctgggctcaagtgatcctcccgccttgacctcccaaagtgctgggattacaggcatgagccactgtgcccgtctgtgtccatttttaaacacctaaaaaaattcatatgaaattcctaatatcagcttctcttggagaaattggaaggaccagcaaatagggatctatattcctgtaagaactccatctcctttggacaggcaggtcctctctcctttgctacaaatccatcctctccctgtcgcccaggccagctgtcgctttttttttttttttttttttaagacagagtctcaccctgttgcccaggcaggagtatggtggcgcaatctcggctcactgcaacctccttctcctgggttcaagcgattcttctgcctcagcctcctgagtaggtgggattacaggcacctgccaccacgctcggctaatttttgtatttttagtagagatggggttttgccacgttggccaggctggtctcgaactcctgacctcaggtgatctgtctgcctcggcctcccaaagtgctggaattacaggcgttagccaccgcgcccagccttgtctgttgcctttatttctgagcttgccttgtttttcttgtgcttggtgtccttcactcatttctttatctgcctccgtagtctctcttgttatctaatcccagatacacacatgtatgcacacttactggagtttgtgaccctattatgacattttggttctgttggtggaaaaactgatcacctggaaaggtttctctttttctcgaagcaattgaaataacccgtgtttaaagataaacgtcttctgttttcagataactaagaaattcgtcaaaggctctacagagaagaacaagctcagactgcaaagagtaagacattttccctgaaatagaaaattaacctgctgtgctttttgcattaaatagtaagcaaagccctttgaagttcctttggtctagtttttacattttccccagccttctctgaccatcattttgattcctgcttcattttaagtacttggacttcatggtttgtggattgtgtcattttttggcttgctgagtgagtcctaaggttttgtgtgtggccttttctaagcttttatcaatagtgctaccactgtcttaatggttcagtatcccattgtag[143 bp omitted]cctcccaggttcacgccattctcctggctc[175 bp omitted]cctggccagtcctgtgtctttcacttattgctaagtgctataacatctgaatagcctctacactcgatgggtggttatcctttagtgactctctgcttagtctcctattctgtggggggcatcaccacgttttccacacagcaatgcagggggcttttgttttgttttgtctttgagacggagtcttgctctgtcaccagactggagtgcagtggcacgatctcggctcactgcaacctctgcctcccgggttcaagcggttcttctgcctcagcctcccgagtagctgggactacaggcacttgctgccatagccagctaattttttttttttttttttttttttgtattttagtagagatggggttcaccatgttgcccaggctggtctcaaactcctgagctcaggcaatcctcccgtctcagcctcccaaagtgctaggattacaggcctgagccactacacctggccgcaggggactttttacttattgcttaaaggttagagaaattgaacatcatgtcataccgaaacaaaccaaaactccagggaaggcctctgggctttgcctatgcagtgccagctcacaggaggggcctggtgaccatgggctctgcgtttactgagtgtttcctgagctccctgatgttcactgggcgtttcctgagcttcctgatggccacactgagtttttgtgtttcagatttggggttgatttttattttattacttttttttttattgagacacagtctctgttgcccaggctggagtgtagtggtgcaatctcggctcactgcagcctctacctcccgggttcaagcgattctcctgcctcagcctctcgagtagctgggattataggcacgagccaccacgcctggataattttttgtatttttagtagagacagggtttcgctatgtttgtcaggctggtctcaaactcctgacttcaggtgatccacccaccttggcttcccaaagtgctgggactacaggtgtgagccaccacgcccagcctgatttttatttttacagtttatctcattctttggaacaagagcacttttaaagctcattggaacctccgagtcccgcacaccgggttggggagcggagaaagtatccaacggcggctgaagaaatctgattcacctgcagtttctagaagccttctatttcctgcttagcaacagggtgggagactcttcacccagttatgtttatagtctccttgttcagtccagacggtcaccttcctcgtgtgtctcgtatatcagatgcagtcacacagcacactggcaggaaatgcacatcagacatcttccaggctgtgtctctgtggcttttgttaaagctaccagagatgtattggaacacatttagaatttttccttagagacaagggcagatatcctaacccaaactgaaagctgagctgtcaggctccagacgtgtgggaagcccatattggatgagaggtggtcctcatgcagtgttaggagcgggcacctgtggagctgggcaggtgagcgttttttttttttattttgagacagtctcgctctgttgcccatgctggagtgcagcggcgtgatctcggctccctgcaacctccacctcccaggttcgagcgattctcctgcctc[134 bp omitted]cggcttcccaaagtgctgggattacaggtgggagcctgcgcctggctgagcatgtttaacattgaacttcagattacgtaatgactgagtgtcccaggccactgccaagtctttggaatgaggaacgtagtgatgaagtgttacttccttaaagaatttgaaacaaggctgggcgtagtggctcgcccccataatcccacactttgggaggccaaagtgggaggatttcttgagcccaggagtttgagacaagcctgggcaacgtagtgtctctactaaaaagaaaaagaattcctgggctggttgcaatgggtcatgcctgtaatcctagcactttgggaggctgaggtggacagattgcttgagcgcaggagttaaagatcagtctgggcaacatagtgagactccatctctacaaaaattagccaggtgtggtgacaggtgcctgtggtcccagctactcgggaggctgaggcaggaggactgatttgagcccaggacggaggttgcagtgagccaagatagcattgctgcactccctccagcctgggcactagaatgagactctatctccaaataaataaataatgtttttttgttttgtttttcagacagagtcttgctctgtcacccaggctgcagtgccgtggcgtgatcttgaactgccttgtgggtttaagcgatccttgtgcctcagactcctgagtagctgggactataggtgtgcgccaccacattcagctaatttttttgtatttttggtagacttggggtttcaccttcttggccaggctggtctcaaacttctggcctcaagcaatttgtctgcctcagcctcccaaagtgctgggattataggtgtgagccccctcagcccagcaggattgtgttttaaatgaatcttatattgaatttcccacaagtaccaggacacagggctaattcttaacatttttctcatgatggaaggaagcataatggattatgaaaatcacttctgtggctgggtgctggggctcatgcctataattccaacactttgggaggctaaggcagaaggattgtttgaggccacgtgttcaagaccagcctgggcaacacagcaaaaccccatctctaggaaaattacaaaaatagctgggtatagtggtgtgtgcttatagcccctgctactcaggagcctgaggtgggaggatcacttgagcctgggaggtcgaggctgcagccagctatgactgcaccactgcactccaccatgggcaacagagtagactttgtctcaagaaaaataaaatcacttctgtgtaaagttgttgactggaggctcctcctggagctggtctctgaattcttatttattcatttatttttttaactgagtctcagttgcccaggctggagtgcagtggtgtgacctcagctcactgcaccctacgtctcctggttcaagtgattctcctgccccagcctcctgagtagctgggactacgggtaccctccaccacgcctggctaatttttttttttttttttattaaatggagtctcactctgtcactgatgctggagtgcagtggcaccgtgttggctcactgcaacctccgtctcctggtttcaagcaattcttctgcctcagcctccccagtagctgggattacaggcgcccaccatgcctggctagttttttttaaaaatatttttagtagagatggggtttc[137 bp omitted]cctgttgaccaggctggtctcaaactcctgacctcaggtgatctacccacctcagcctcccaaagtgctggaattacaggcgtgagccaccatgcctagccttggtccctcaattctgttcatcccgtccaggccgtgctgtcctccatgctgtgaaccgagcttcctcctgggagttggagggagggccacctgtcacttgccacactgtcttgtaggatcaggagcgtctgggcaagcagctcaagttacgtgcagaaagggaagaaaaggagaagctgaaagaggaggccaagcgggccaaggaggaggccaagaagaagaaggaggaagagaaggagcttaaggaaaaggagaggcgggagaagcgggagaaggatgagaaggagaaggcggagaagcagcggctcaaggaggagcggcgcaaggagagacaggaagccctggagtgagtgtccttggaggccatgctgggcccgccaccctgctgctggattccgctcctggccactctgatggggcctttccacttcacaggcagatggcggctcccttcagttccttcccatttctccttcgtgaggtgcccgtggggccctgacgtgggagcggtggaaagcagctccctgctctttagtgctcccccacgtccaactcaccctggaccccttgtctctgctgtgaccatccttccagttcccaaccaacttaggcatttgcattgcaggattgtgggttttgtctgtgctaattgtgctctgactggctaaagttttttatatatattctagtcacaggaagaattttattgactgttttccatttttattgtgaagacctatgtaaaagccttatactagacatgaaaataacttatattcatttaatgtaaaatgaaatacttgccatatactaacagttgagtgctgcggtcccttccagagccaaagcaaagagtcggctgaaatgtcatttgctgtctcacagggctaaacttgaggaaaaaaggaaaaaggaagaagagaaacggttaagagaagaagagaaggtagagtgtttcccacagagcttccccgtcccagcccgttggagaagcagatgcccaaagtggaattcttgccacagccgtcacctaatattctcttggtttggggaaaccaaatggcgcccgcagggagggcgagtctgtctagatgcgttcttgttgcttcttcccagtgctggctgtcacatgcctactggccctgcaatcctggcacttctacccacaagggcaacttggacattttgagattggctggctcagttgcgggtccgtgggttttgagagctgaaaatcacagtagtgccttcaagctaaaatgcttgacgttcggttctgggggcctttgcatgttttgcaacacatactgttcctcttcctctcctctttctcatcaccatctcttaacatcacagcgcattaaagcagagaaggccgaaatcacgaggttcttccagaaaccaaagactccacaggcccccaaggtgagcagccggctgcctttgcttttgggtttcagctctgctagacttttcctttctgaaagtgaaagggtctctccccagccagcttctctcattaggagggagggagcctccagtgacctagggcacttccatttctggttaagtcttgaggctcaatattttgtccttcgctttgtcccaaagaggtaaaaagtggcatgtctgattaaacagtgctgttttcagaggttacttcatgaataattttgtgttaggcgtaagagaaattcaccatgtttttacccttgggaaacttaggcttaaggagggagcacgtttagctgtaaaacaacagtacaattcacaaaggtttactttccctgcctggcgtcggtcacctggcatctcagaccttctgagccaccatctgtgcatggaaaccacagccctccttcccctttacccagagggagcccatctccaatgttaggggtccttcagtgcctttccctgctccactcactgtatttatacacatgtgtacttagctatctcagatttgtgccatgttgccacatttagatgtatttcattctttttaatgtatctggcctttatttattttttgaggcagggtctcactgtcacccaggctgtagtgcagttgcacaatcaaagctcaccacagccttgacctctcagggtctggtgatcctgtcacctcagccttcccgagtagctgggactacaggcatgtgccaccatgcctggctaattttttatttttattttttttgagatggagtctcactctgtcacccaggctgcagtacagtggtgcgatctcagctcactgcaacgtccacctcccgggttccagtgattcttctgtgtcagcctcccaggtagctgggattacaggcacatgctaccacacctggctaatttttgtatttttagtatagacggggttttaccatgttggctaggctggtcttgaactcctgacctcaggtgatccgcccgcctcagcctcccgaagtgccgggattataggcgtgagccaccgtgcccggcctaattttttaatttttttttgtagagactgggttttgctatgttgcccaggctggtctcgacgacctggcttcaaatgatcctccaaacctcggcctctcaaagcacttggattacaggtgtgagtccctgcacctggcctgtccttttatttgtatgttgagacatttgatggcaattgtgtatcctgaaggtgcacaatgtgacattgttgtacctacacatcatattgtgacagccagagatccacatcatgtattttcactgccgcataatacttcataatgcaatgatatggtttctctctttttttacaaaaattatttatttatttagagacggagtattgctctgtcacccatgctggagagcagtggcgctatctctcggctcactctaacctttgtctcccgggttcaagcaattcttctacctcagcctcccgagtagctgggattacaggtgcctgccaccactcccagctaattttttgtgtttttagtagagacggggtttcaccatattggccaggctggtcttgaactcctgacctcagatgatctgcccatctcagcctccctaattttatttttagtagagactgggtctcactgtgttgccagggctggtctcgacctcctggtctcaagcatttctctcgctttggccacccaccgtgctaggatcacaggcatgagccacagagcctgccactatctcaacctctttgcccctcagtggtgtagggggggtccctgcacatgcttctctgcacacatgcattcctctgggacagccaagtaagcatgagttcacctctaggacaaaatagcatattgctgaagcatcatgagccatggccagagtgcgtgccagatgggaaactcagatgtacattcccggcgatgtgtggaaatttcctccccattctctgctatcactgcaatttttatgggattaattttcttttaactttgccagtctgatggatttttaaaaattgacattgttttactttccatttttacttgactcttggtgcagttgagcatctttttctgttcgtttgccattttagttcttctatgacttgccaattcctatttttttacctatttttctacaggattttctttttttttctttgcctgatctgtaagttttttttaacatagtctagtatttcattctccgtgatatttcgtctcagcctgttacctctttgtttacagtcttttttttttttttttttgagacacagtttcactctgttgctgaggctggagtgcagtggtgccatctcggctcactgcaagctccacctcctgggttcacaccattctcctgcctcagcctcccgagtagctgggactacaagcgcccgccaccatgccccgctaattttttgtatttttagtagagacggggtttgcaccgtgttggccaggatggtctcgatctcctgaccttgtgatccgcccgcctcggcctcccaaagggctgggattacaggtgtgagccaccgtgcccggcctttgttgttttttgtttgtttgttttgagacaaagtttcgctcattgcccaggctggagtgcagtggcatgatctcagctcaccacaacctctgcctcctgcgttcaaatgattctcttgcctcagcctcccgagtagctgagattacaggcatgtgctgccacgcccagctaattttgtatttttagtagagacggggttttt[131 bp omitted]ccttttggccaggtgcggtggcttatgcctgtaatctcagcatttggggaggccaaggcgggtgaatcatctgaggtcaggagcttgagaccagcctggccaacaaggtgtctctactaaaaatactaaaaatacaaaaattagccgggcgtggtggtaggcgtctgtaatcccagctgctcatgaggctgaggcaggagaatcgcccaacccaggaggcagaggttgcagtgagccgagattgcaccactgtactccaggctgcgcaatgaagcgagactccatctcagaaaaaaaaaagaggagttgtgatctttcaaaaaaagaccctgtctttttttttttttttttttttttttttttttgagaaggagtcttgctctgttgcccaggctagagtacagtggcgtgatctgggctcactgcaacctctgcctcccagatccaaacgattctcctgcctcagcctcctgagtagctgggactacaggtgcccaccaccatgccaagctaatttttgttttgttttgttttgttttgtttttgagatggagtcttgctctatcccccaggttggagtggtgcagtggcacgatctcggctcactgcaacctctgcctcccaggttcaagcaattctcctgcctcaggcccaggctagagtacagtggcgtgatctgggctcactgcaacctctgcctcccagatccaaacgattctcccgcctcagcctcctgagtagctgggactacaggtgcccaccaccatgccaagctaatttttgttttgttttgttttgtttttgagatggagtcttgctctatcccccaggctggagtgcagtggcacgatctcagctcactgcaacctctgcctcccaggttcaagcaattctcctgcctcaggctcccaagtagctgggactacaggtgcatgccaccgtgcccggctaattttttgtattttagtagagaccgggtttcactgtgttgcccaggctggtctcgaactcctgagctcagacaatccacccgcctcg[134 bp omitted]cagcctcccaaagtggtgggattacaggcatgagccactgcccctggcctaatttttgtttttagtagagatggggtttcaccatgttgggcaggctggtctcgaactcctgacctcaggtgatccgccttcctccgcctcccaaaatggtgggattacaggcatgagccactgcccctggcctaatttttgtttttagtagagatggggtttcaccatgttgggcaggctggtctcgaactcctgacctcaggtgatccgccctcctcagcctcccaaagtggtgggattacaggcatgagccactgcccccggccttttttttttttttttttaagtgaggtttgttgagatataatttacatccaataaaataaactcttttcaggacatttgtgttgacaaatgacagggccagctaaccataatgaagataaaccctatttccatcactcaaaacagctcccttgtagtctgtccccccaccgccggcccttgagactgccaatctgccctctgccctgtagctctggaaactcggctctgtggacccacacagtgcctgggcttttgagtctgtgccttggccttagcctggatgaatcccaccagcaccctgctgtgtgcgtccatggtgcctcctttctcccattgctcgaagaccccatcgggtctcttcttgatttcagaccctggccggctcctgtgggaagtttgccccctttgaaattaaagagcacatggtcctggcccctcggcgtcggaccgctttccatccagacctctgcagtcagctggaccagctcctccagcagcagagcggcgagttctccttcttgaaagacctcaaaggccggcagcccctgaggtccggacccacgcacgtttccacccggaatgcagatatttttaacaggtcagagcctgaggaggtcggccttcacccactagtgatgctggaggccagcatcctgaaccctggggtccccggggtgggagctctgggtccttctgttgcttgcttcctagtgccctcgggccctgggcttcggtgctggctcaggcctctctccacctggccttcctgtaagctcctgaagtcttcctctccctgtcttcccagctcctcgtggaggaatcttatttccctgctggtctccagtgaaggataccccccaacacctcgctcttgcaaatctcattccacagaacctcccttgctaaaaatgctctggggctgcacctgggcagctgtcctccctctcaccctgcaggctgcaccctcctccatctgtcccttcagtccatgttcctgacctttctttggggacaggcagtgctgctttttaacaaatgcccatctttctagaattgttaggccagcttcacagggaggttcctgggaggtttgtgagcaggtctgtaaggcagcgtgatcctgagcctggggttttccttctcagtgatgtcgtcatcgtggagcgtgggaagggcgacggtgttcccgagaggaggaagtttggcaggatgaagctcctgcagttctgtgagaaccaccggcctgcctactggggtacctggaataagaagacggcactcatccgcgcgcgagacccctgggcccaggacacggtgagctagccccagagtgcctccgtccccgtacctcctcactgtgcccctttcctccagccccaaagacagttgtgagtcccatgtgtttcttttctcagaagctcctggactatgaggtggacagtgatgaggagtgggaagaagaggagcctggggagtccctgtcccacagtgagggggtaaggatgtgccccagctgtcttcactcacagacggcttgtgtttgagtctctgtcccacagtgaggggctaaggatgcagcccagctgtgttcactcactgacagctggtgtttgacctgctgtgtggtctgaaacctgaacgcacctcaacatccagacttccagcttctctcgaaaaatctcatctggtgacactcgcccacgtggctgctggggatgggatcccgtccgcatctgcaccgtggccccacagccccctcttgcctcctgcgggcctgctgcacaccatttcctcctgactgcccagctgctgtgacctagtgggctttctgccgatgctcaccgtgtctgtcgggaggccatgcaaagcagatgttcacagctttacatttttttgtttctttaagatggagtctcactctatcactcaggctggagtgcagtggcgcgatttcggctcactgcaacctctgcctcccaggctcaagtgatagtcctgccccagcctccctagtagctgggattataggtgcgtgccaccatgcccagccaagatttgtatttttagtagagacagagttttaccatgttggccaggctggtctcaaactcctgacttcagatgatccgcccacctcagcctcccaaagtgctgggattagaggtgtgagccactgcgcctggcctactttgtttttaataaggcacacactctgcttttctatctgatgaactcttttttttttctccttttgaggatgatgatgacgacatgggagaggatgaagatgaggacgatggtttctttgtgccccatgggtacctgtctgaggacgaaggtgtgacagaggtgagggagtgaagggggaggtcaccggctcagcaaaagttcatttctggactggtgctcagtggcctgacctgggagggtgacgggggtcccagcccaaccatacgagatttggactgcattccaagcacgcaagctcactcgtgggaacagctgggcctgaacttggtattacctgggagggtggcagacgtaggaggagcttgcaagcgaggggagccataggagcagacaccctggtgagggagcgtggccatggtctgtgggttagaaggctggaaaccacccgagctgacatacagtcagcatgcagcaagacatgtgcattgtaagtgttgagtttgatgacgtaacaatcaagtgaatgtgggcaaccaccgcccgaaataaaacagaacttccctatctctccagaagattgcccacgtctctgcaggcgaacctgcctgccacccctttccagattccataaggttgtggaactgtctttttttttttttttcttgagacggattctcattctgttacccaggctggagtgcaatggcccggtgttggctcactgcaacctctgcctcccgggttcaagcaattctcctgcctcggcctcccaagtagctgggactacaggcgtgtgccaccacacctggctaatttttgtatttttagtagagacgggagttcattatgttggccaggctggtcttgaactcctgacctccagtgatccacccgcctcggcctcccagagtgctgggattacaggcatgagccaccgagcccggcaggaacttgctttcaagcaagttgtttttggtcctgttttgttttgaaggcctgtcgtttgggaagtggggatttggtgggactgtctcatggttggactggaggcctaggcattccttgtgcatatctgaccaccgaggcctgaactgtcagtcagagagtggtctcaggccctgcatgtgtctgccagatgcctgggccatgtgggtagacacccaaccctgttaaacggctccacgatcacacattcaccagaaaattcagaggggtgttaaaagaggcctcatgggtgagttcagaaatatctgtgacgctcccaaaggagaccaggtgtgaattattccatctggaagaggggcagccagcgcatggtgtgctctgccctggccctgacactgtgggaagttttgtgcccctgtcctttcctcttgctccccagctggctggggactggttcctcaaaagagtgcccgggcataggggagcaagaaccccaaataaacttctgctttctaaaccacaaggagtgtgccgaccctgagaaccataaggtccgccagaaactgaaggccaaggagtgggacgagttcctggctaaggggaagcgctttcgcgtcctgcaacctgtgaagatcggctgcgtgtgggcggctgacagagactgcgcaggcgatgacctgaaggtactgcagcagttcgcagcctgcttcctggagaccctgccggcccaggaggagcagacgcccaaggcctccaagcgggagaggagagacgagcagagtgagtgtgggcggggccaggccacccacctgttcctgggcccagctaattccagggctgagggcaagagtcacaggctagtgggtccgtgatgcaaatgttctttccacaaataacagaggccagcccttttcctgtacatgtccgtacgttcaatgatgtccctagcagcaggacgaggcaggtcccttaattggcttgttttatcaaccaggacacaggcacagagagtgctggagtgggggctgtgctttctcaaaagccagggaggggccgggcacagtgcctcatgcctgtgatgccagcactttgggaggccaaggtgggaggatcgcttgagcctagtgcttcgacaccagcctgggcaacatggcaaaaccccatctctgcagaaaatgcaaaattacctgggtgtggtatcacgcacctgtgatcccagctactcaagaggctgaggtgggaggattgcttgagcctaggagtttcagaccacagtgagccatgatcctgccactgcactccagcctgggtgacagagcaagaccctgtctaaaaaaaaaaaaaaactcaaaaaactggggagggaccatggcacacaaggagagcagggcagtcatttgggtaggaacagcaggcatttgaagtcagccctggcaacacacgtgcccggccaaggctcacttctgggcaggtgcgtaggtgctaccctgtcttacacccgccctcatgaggccacctatccccgaagctggccatgccccaagcctcggtggcaatgagcttgtgtatgtgttttgttttttggcctgtggtgatgggtggctccccaagcctcatgcccacccatgttccctcctgccagtcctggcccagctgctgccgctcctgcacggcaatgtgaacgggagcaaggtcatcatccgggagttccaggagcactgccgccggggactgctcagcaaccacaccggcagcccgcggagcccctccaccacctacctgcacacccccacccccagcgaggatgccgccatcccctctaagtcccggctcaagcggctcatttccgagaactcagtgtatgagaagcggcctgacttcaggatgtgctggtacgtgcacccgcaggtgctacagagcttccagcaggagcacctgcccgtgccgtgccagtggagctatgtgacatcggtgccctcggcccccaaagaggacagtggcagcgtcccctccacggggcccagccagggcactcccatctcgctgaagaggaagtcagcgggcagcatgtgcatcacccaattcatgaagaagcgcaggcacgacggccaggtgaggtggggtgggcaggtgggggcctctgcagggcttttctttttttgtttgttttttgttgttttgtttttttttcgagatggagtcctgctctgtcacccaggctggagtgcagtggcgcaatctcagctcactgcaacctcctccctcctgggttcaagtgattctcctgcctt[221 bp omitted]tagggtcacagcaaaatcgattggaaggtacagaaagttcccatacacctccttccccaaagccaagccaagccacccaacatcacctcccagaatggtgcattggttacaatcagtgcacctcaggccaggcactgtggctcacgcctgtagtctcagcactttgggaggctgaggcgggaggatcacttgagcccgggagttggagaccagcctgggcaacatggcaaaaccccatctctaagaaaaaatttttagattagccaagcggtggcatgcacctgtagtctcagctactcaggaggctaaggcgggaggattactggagcctaggagattgaggctgcagtgagctatgatcatgccactgcactgcaacctgggcgacagagcaagaccctgtctctaaaaataaatacataaaacgcaccttcgttgatttatcaccaccactagggtttgttgctggtgttgagggttctgtgatttgaatgaatgttggatgctgtgcgtctacctttattgttttaaacaaagaggcttctccccactgaaaggcccctgtgctctgcccgtccaatcccttggaaatcaccaacctctctatctccgtggatcagccttttccagattgccctgtagctggaatcgcatcgtgtgtggctcctttgacttggcagtatgcgttgacagttcctccgtgtctgtttgtggcttgatagctcttttttttttcacactgaataatattccatgtggtagcatttttatttttgttcaacggttcttgaattttgcattcaagcacagttattaagcacttactgtgctccaggcactctgatcggtctctcagacacaggtatatgcagaacaccgcccggtgtaaggcacagacaggagcctgtaaggggaatgaatggctgtgtgattccagccttatgggtgcctcggaggcacaagcgcatggagccctggggtgtgtgatgggggcactgtctggtcttaagaaactctcatgcccagagagccactggcccctggcacccacccctggccatagatcggctttgttaacgttcattgcatactttttgtccttaccacacagtgttcggaagtgagtttctcttttttcttttttttcctttttttttttttttttttttttgagacagtctcgcgctgttgcccgggctggagtgcagtggtgtgatctgggctcactgcaagctccgcctcccgggttcacaccattcttctggctcagcctcccgagtagctgggactacaggtgcccgccaccacgcccggctaattttttgtatttttagtagagacggggttttaccgtggtctcaatctcctgacctcgtgatccgcccgccttagccttccaaagtgctgtgattacaggcatgagccaccacgcctgtcctggcctttttttgagtcaggggtcttactctgttgcctagtctgtagtgcagtggcgtgatcaccactcactgcagccttgacctccccaggctcaggcgatcctcccaccttagcctcctcagtagctgagagggactacaggtgcatgccaccacacccagctaattttctgtagaaacagggtttcaccatgttgcccaggctggtccccaactcctgggcttaagcaatccccctgcctttgcctcccaaagtactgggattataggtatgagccaccgtgcctggctccctgagtttgatttctaatatctacacttaacgcagacctatctgtccctgtgaaccttgggctttccttcaaggccacgatctgatggagttacaggttttcagagacttgggacaaggagcaagacagtggataacccccggccccagcttgcatcctcttctctgatgttaaaggtggtcgttggctgggcacagtggctcacgcctataatcccatcactttgggaggccaaggcgggcagatcacctgaagtcaggagttcgagaccatcctggccaacatggtgaaaccctgtctctactaaaaatacaaaaattagctgggcatggtggcaggtgcctgtaatctcagctactcgggaggttgaggcaggagaatcgcttgaacccaggaggtggaggttgcagtgagccgagaccacaccattgtactcgagcctgggcaacacagcaagattctagtcccccaaaaaaaaaagaaaagaaaaggtggtcgttaggggcagggaggcgagagaaatggctcctgagatgatgctcagccatctccctgctgccagcacacagccatgggccttaatatgctgtgaatctccctcagctgtcacagcaggaggggccatcataacatcccaaagggtccagggctacgactgaaactgttcctggcactccctagagcctctgtccctgtacagtgtgtcatgtgcatagttcccctggctctgtggaggcggcttggcgccgtgggaagctcagtgcattggagctggggccacaggaggcccccacacagagctttgctggatgcattctttgttcaagccctgtgtgagcagtgcctttccctggtcacctgagcagccttagagggaaccggagctccccagcctgaaaatgatcggggcgggaaggtactatctggttgtgtcactatgcaagcagttttccagggcctttgctgatcagccctcccctgggaacccctgtgtccctcagatgttcctttggggtctcctcatgctccacacagtagtccaggccctggacggcctccttccccacccctctccactgatttgatgcagcagctgcctctcccagctggggtgcagtgccccgcccctggtcctcccaaacactgctcttgctccctgtcaacatgtggaacccatgtttccccacccggaaaatagcgccctgagccccatgtgcccagcaccacatcagagttactgtgcttcgggggcagtgagtgcctgtttatcatccctaaccacaaggaaagaagggtgcacccagtttaactagagtgggtcagagaggttgggtgggccttggagttagcaaaacacagcatctcacctgctaatggatggcagtggtggccacatgcgcgtgattggtggcctctgctgcgtggcacaggtgagggcctcctggggctcagcagtgcagcggacgcacgaaggtcacacgtgaaggaatggagacccaggcccagcttgatgcttaacccccacccctgaacctcctgcagtttgggacataaacgtccctggggagcagggtctggtcctgtgttttttttcagagcttgtgtggggaggggcacacaggtgggacccaaaggtggggctgtggaagcacatgagcccggatgggacatgtgccctggcatcctctgtttttttttgacagggtctcactctgttacctaggccggagtgcaatggtgcagtcacagctcaccgcagcctccactcctgggcgcaagtgatcctcctgcctcagcttcctaaggagctgggagtatagaggcacgtgccaccatgcccaactaattttcaaatattctgtagagacagggtctatgttgcccaggctggtctccaactcctgagctctagcgatcctctctccagcctcctggcatttaataaagctgctgactgatgcttctgcacccaaggggagggataagccattcatctgcaagtggtgtacatccatattttttactcggttacactttttttc[136 bp omitted]ctgcctcagcctcccaagtaggtgggactacaggcgcccaccaccacgcccagctaattttttgtatttttttagtagagacggggtttcactgtgttagccaggatggtcccgatctcctgaccttgtgatctgcccgcctcggcctcccaaagtgctaggattacaggcgtgagacaccacgcccggcatcttttcttgttgttaaattagaaacagggtcttgccctgttgccctttattattttaggttcaggggtacatgtgcaggttggcaaactcatgtcacgggggtttggtgtatagatgatttattgggtactaaggtattttttctgaatttctccctcccaccgtcacataggctccagtgtctgttgttcccctctttgtgtccacatgttcttataagtgagagcatgtgatatttggttttctgtgcctgcgttagtttgctgaggataatggttcccagcttcatccatgttcatgcaagaagaggtttttttgttttgttttgttttgttttgtagatattgggtcctgctgtgttgcccaggctggtctttgaacttgtgggctcaagcaatccacctgcctcggcctcccaaagtactgggattacagacctgagccagggagtctttaaatctttttacttagagctcaaaagagatattcttaaggcattctgacctagtggggtgaagtgccatgtatctgtgaagccctaggacacctcaactcttcgggcctccgttttatttaaaaattttaaaatacaaggaaggatgtgtttgcccttgccaacaaaacattatg[132 bp omitted]aaacccgtctctactaaaaatacaaaaaattagccaggcgtggtggcggctgcctgtagtcccagctactcgggaggctgaggcaggagaatggcatgaacctgggaggcggagcttgcggtgagccgagatcgcgccactgcactccagcctgggcaacagagcgggattctgtctcaaaaaaaaagcatagatggctgggtgcagtggctcacgcttgtaatcacaaaactttaggagaccgaggcaggcggatcacttgagaggccaggagttcaagaccagcctggccgacatggtgaaaccccatctctaaaaatgcaaaaattagctgagcatggtggtgcacgcctgtaatcccagctactcaggaagccgaggcaggagaatcacttgaactcaggaggtggaggttgcagttgagccgagattgtgccactgcactccagcctgggcaacagagcaagtctgcgtctcagaaaaaaaaaaaaaagacaaaaaggcacaaatgttagtgacaccatcttcatcccatgtagtcgttaaacgttttcctgactcctgttttccgtagtctgcgctcctccgtgtctgtgtttagcacttgcagtgctgctggcgagatgacagctgtccccgtgaagcaagctgccggcagctcagcacagtgggactcggtgttatgtgttaaatcctgtcttcagcctagagggtgaagagtggtgattgctctgaaaaattttggatccaagaaaagcctaatgtgtcaacgcgtctcctgtgtggagggagggcccagtgacttgaggtggctctgaagaaattggcatgttcttttgtttaacgtccccagacacctccagatcagaatgtccctcctcagcagcgtctacaggggactcttagactcttctttgcttaactattctttcaaaaaggtagttgaaaatggccgtaggccaggctcagtggctcatgcctgtaatcccagcactttgggaggctgaggcaggaggatcacttgagaccaggagttgaagggtgcagttacctgtgattgcaccactgcaccacagcctgggtgacagagcaagatgtttctcctgtgtcctcacagggtcaacccatgctgcctggggagagggacagcctgggctcccagccactgaagagaggatccaggaggggagcccctacccaggaattgatgaggctacggtaggaacccagtctgcctggccaggcactgtgctcttacatgacagcccatgaaaccagtctatggcctgaccgttgtgttgctgtgcggtcacttttctaggtttttgtagaggaagaattcctggaattttttgaggactatcctccctactgaaataagtgtggctgtctgtcctgggatgggcttgtgttcatgcacagagagggtaagcactgacgtggaggctcatggtggcctctacgcatcctgtctttctcctttggtgaaagcaaatggaaacagctcaggaatcttactagggtcaggtgcggtggctcacaccttgtcatcccagcactttaggaggccgaggtggaaggatggcttgagcccaggttgagaccagcctgggcaacatagtgacacccccttgtctctacttaaaaaaaaaaaaattagctgggcgtgatggcgggtgcctgtagtcccatcttctcaggaggctgaggcaggagaatggtgtgaacccaggaagtggaatttgcagtgagtcgaggtctaaaaaaataataataataattcacaagtcacagtcatcacttcacatcagggacgtgttctgagaggtgtcctcaggcaatttcatggttgggtggggctaggttgctcttacacatcctagatggacagcctgccacacgcctgggccgtgtggtacatagcccagggctcctgagctgtggacctgtgcagcaggtgactgactgctccatcctgcaggcacttgtaacccagtggtatatgtgtctttaacatagaaaaggcacagcagaggccaggtgcggtggctcatgcctgtaatcccagcactttgggaggctgacgtgggcgaatcctgaggtcaggagttcgagaccagcctggccaacatggcgaaacccccgtctgtactaaaaatacaaaagattagctgggcgtagtggcgggcacct[137 bp omitted]tggtgaaaccccatctctactaaaaatacaaaaattagccgggtgtggtggcaggtggctgtaatcccagctactcaggaggccgaggcaggagaatcacttgaacctgggagtcagaagttgcagtgagccaagatcgcaccactgcactccagcctggatatatggcaagactctgtctcaagatttatatatattaaataaaaatacagttgtctgtaatcccaggactttgggaggc[134 bp omitted]gaagaacgagaatcgcttgaacccgggtggcggaggttgcagtgagctgagattgtgccactgcactccagcctcagtgacagagtgaaactcccgtctcaaaaataaaaaataaaggccaggcatggtggctcacacctgtaatcccagcactttgggaggctgaggcgggcggatcacgaggtcaggagatcaagaccatccggataacacgatgaaaccccgtctctactaaaaatacaaactgggcgtggtgtcaggcgcctgtagtcccagctactcaggaggctgaggcaggagaatggcgtgaatccgggaggcggagcttgcagtgagtcgagatcgcgccactgcactccagcctgggcaacagagcgagactccgtctcaaaaaaaaataaaaataaataaatacagttgtaatctgatggggccactatcaggtatgcggcctgtcactgactggaaattattctgcagttggcaatgatggctgtttttggagatctgaatccagttcatttgagggaacccccaaggttctctggttgtggcctcttgaataaacctctcacatttggacagtttgttaccaaattgggttctggatgttggtttccttccgtgttgggggtgggaggaaggtgtcacacctgtggagttccccccgctaccgcactggcaccagggtggctgctgcctgcagtgctgatggccgtgtaccctgtctgtccagattggtgctgaagacatggacggcttccaggcagacacggaggaggaggaagaggaggagggcgactgtatgatcgtggatgtcccggatgctgcgggtgagaagggctgtagatagcagaacgcactggtgaggtgggcgctggaggtaaacctcaacagagaagggatggggctgcctaagactagctccactgtgagcagccaggagggcttgcagctggaagtggctcctgccctgccacatcctcgggcgggctgggccgtgggtgctgaccatgccaggcatcgttctggccgcagagccacaagggcctatgctgggagtctcaggtggttgtgacgttagatgggggtcagggaaggctgcactgaggcagcaagggagggccaggtggatttctggagcactcgccaaagaggaagtacagaggccctgcagcaggctgcgtgggaggagtgtgcccgggtggtggggggcaggcagggtcaacctgagagcaggtgagcaggtcacctctagaagaggcacaacgccccagcctctgcctgtccccactgtcaggtggagggtcccgccctggggttgttgcaggccccatgaggcagcagggtggggtcttcccccagggagcccagagggcccagccagctcaagaccctccctctcttgccctgcagaggtccaagccccgtgtggagccgcttccggagctgggggtggtgtgggggtggacaccggcaaggccaccctgaccgcgagcccactgggtgcatcctgagagcaggggtgacgtatgtagaatgcttagggtgtcctccccacagagcagatacttgaaccgactcaattcctgtgtaaagagcactttgtcctgcttcacggacctccccaaagtgtgcagagttctatataggatgctggattagttcctttgatatttgtaaaaattcccccaagagccgcatatgaatctgccctttaataaagcattattgagattgctggcctattggggaagcctgcgggcacaggagcaggcgtggaatccaatacttgtaaatgaattgaagcgtcaggaccacccgcctggccacgtgcgcgggcccctggacctaacgaggcagtgtataaacttattctctagccctgagctgctctgtctgtcttttccgaaaacattgtgtttctctgagagtgcaccttgcccatggcccggccccatgtggtgcctggtgtctggggccagccttgtgccctgcaacagcaccgtcccatctgtttgtcactaagtcaccctcataccaggctgacctgggtcaaggtgcgggtttttccgcacgtgcttctgtccggcgatccctcctgccctgggttggggggttaggagagggtgttcccagagacctgctagggtcacctccctgaacccggagctgctgggagccgagtttggcttcgagtctgaggctttgtgagagcccaccccaggtcaggtgcatcttttgcgagtgctggagctagaaggtgacctcctccccgccccaggttgagtgggctttatccacactgtccgagggaggacaggcgacagccgctgtggtactgagcagctcagagcacacgcagccacggggagggtcacgctcgccagtcctgctcttcccagccacaccccacctgaagtcctaagcttcccttcagggaaccctatgtgggaaaagtgtcagctacctccatccacccagtcagggacggcagggcgcccgggccaggccttcctgctgggaagcaggattcagctgtgcctgaagcagaggctgcccctgtgccacacctttgatgagctttacaggggctcccgacaacccggaatcaggtcctggggcctgcaggacgcaggactggagtgacagcctccattctcaacaggccgggtgcccacaccagctggggcagtgccgggggcgagggagggaccaatgcaaggtcaggggcacgagcataggccccgggcacctcccccaggtgcagacctgcatccccaagtcagcagtggggccggggcacacatgccttccacactgcagggcagagtccctgtgtctcctggggctgctgtaccacaaacctggtggcttaaagcaagtcaccatctcacagcttgggggtcagagtgcacacatgccccgccaggctaacatcaagctgtgggcaggaccaggccctcctggagagtttcccagtgctcggaggcgctgcatccctcagctcggggtcccttcctccaccttcacagccatgcgcagcctcttccagtctctctctgattcaccctcctgccacctcttgtgaggacactgggtcccggaccacccaggatcatctcccagctcaagacctttcatcatacccaagcccctcttgccaggtgaagttgcgcatctgcaggttccaggaataggatgtggccgtctcaggacaccctgtccctctggccacagggaagccaggcctgtgacagcactcgcctcccctgcagggactgggcctttgtgggcacagcacagcctcccctagcgcacgggacttcctccccaggtgggtggctcatcgggcacttgtggccaggtgctggcctgagaacaggtatccacatggtcccaccttgacagggagccacacccagcccccaagccatccgctcttcagcaggtgggcctgccctgtgtcccacggtttcaacggagaaccaagaaactatattcaaacaacctgtttatttgggcttatgatttactaactgcaggtctatgtgcaggaaggccagcatcccctcctgccgttgtcacccacatccacagagcagccctagtgccaggtgcagccactgccacccacggcacacgggaacaggacccatgctgcaggcctgctctcctgcccagggagatgccacgtgtgtctgtccggcagcttcatgacacagttaccaagcagctagggagggcttagatttgttggtgtccccaggcctctccctcgggggcttgggcgcatccccacagcccccaagggatgggggctctgccacggggcccaattccacagctccacggctggcgcccctcccgtgcccatggggcagagccaagtatttccagaggtggcttggaggccctggggtggcggggagaggaacagggagagcatgagacagacccacagggctgaggccaaccctgcttttatttcacaagagcttctcgatggctgacaggagctcgggtttcaggatggagtccggctcggcccccgcggccttgatgtcctccagcacagccatgtcccacgagaaggtcaggagggcagagggcacctgcggtaggggtaggccgtcactctgagaccgagagtcggcccttgccgcggcagggaactcagcgggcaacctgggcgcggggatgccccggcctggaagccatctcagctggtggaggctgtggctcgcacccaggcctcctgccctctccctccgggactccaggacctaagcctaaacctactgcactagctaacgcacgtcaccgctcccatttgatggggaaactgaggcgtggagtagttatgaacttgctcgaggccctgctgccagtaagtgggaaagcaggattcaaacccagggacctgcccaggccccctgctctgagaacaaggaggctccctcctgggggtgtctgtgccggtcccaggagaacctgcagaggcatcgggtcagcggtgctcctgcgggccgacactcaccagcccgcactcgttcaaggccaggttctcgtcctcggacagcttctgccctcccgaggccagcagctcaaaaggcagccagtcgctctgcagggcctcccggacgaacccgtacaccgcccccagccgctcccgagcgtagaaagtgcctggggagtgggggagtcagagcgggtggggcccagggccccctaccaacccgagccgccctccacgggcatcgttggtgcccaccctgcaggaggcagccatcggggaggcgcacgcgcagcagcgtgtagttgtacttgcgcagcccccgctgctcctccttctcccgcatggccttggtccgcagcacgctcagccgctccaccgcctcggacctgcacacgcgggccaggtcacgagggctggccggggttcttccaccccgccccgccccactctgctccgcggacgtcaggcccacctgagcctctgctcccgcttgatctcctctgctgtgaggttgaagaagtccccaggcagttcgaactgcgaggccaggggcgagggctggaagacgcggcgctgcctgtccagcttggcgcgcacgggctccgcagccagcagctgttccttgtgcctctccaggctctggggctgggccaaggtggtctcgctcagcacgtagaactcctcggggtcctctacagcgtggcaggacatgggtgtcactgtgcaatggagagacccccaagccgggccctcctgccccgaggcccctcgtccccattccctactcagccaggccctgtccacttaccctgatcctgggcgggaagcaacaccttctggaacccaatggcctcaaaaaactcgtgggtcccttccaggcagttaatgcgctcctgggggtggagatgggcgtcactgggggcccctggcttcctccatggcctggccacaccccacccagtccaggggcccggctctcgctattgggagcagctgtcgacccctggatggggcccagccctgggggtgcctcagtgctggatgcaaacctgcttttctacggtgggggctgtggagtctccaacagctctgcacagaggaaagagtcacaaccaggcacgaagagtgaggctgaggagccagacactgctggggcctgatgcgaggctaacaccgcccaggaccccagtccctgccctttcccccagaagaaccagacatctggtttgcatgagaaacctccccagagtcgacatgttcccaaacaagcccagctgaagaggaggaaaaggatgcaggtgaggagaggcagaatttgttgatttggggtgaccggtgcataaaagtcttgctctccatcttgtcctgctaccttctactggccgaacccttcactgcttgtggctcaactctcgctagctcctccagggagcccaccgcctggtgtgggccaccaccggctcctgcaggccagctgcccccacccccagcctgggccccgggggccagaaggcacgcccacctgaaacaccttgttctgcagcttgatcttccggtacttctcctcctcggggtgcaggtggatgttgtccaggtacctggggtaggtggagaaggtgagtggggcacagcccaggctgcccacccggcccctctgtgcctcctgctccaggtaacagcagctcagccacacttggcctctagtcagagggaagaagcggcccagtgacgcgagggcagcagaccatctccgggtggaaggcacacctcggacaccccatggagcccacccctggtgccagcaggagccccacggaacccctcaccgtcccaccagccctggaagggcacaattaaccacagcggtggggaagccacagtgccggaagagtggagagccagagctgaagggccgcagtgccagcagggggctcctgcggggtgctccctcggcgttggcgggcagcgtggacctccaggcctgcccccgatcctgagacccggggagtggggtgggaccctgcctcctccacatgttccccaaggaagccagggtgggaaacccctgattccttcaacaccttcattttgcacacgggtaaactgaggcccaaggaggcccagccctttgcctgaggcctctgggtggagctgcctcactctcggcctatgctccttcccaacccacctcagcaggtaatgagggggccagagggggtgacagccccagtgggaggggtgctgggatgagctggaggggccaggcagggcaaaggggccacacgctcacttggcaatggtgtccacacccagcttcacccggtcctggtctttgttgaacgtgtagatcttcatgatggaggcggccactgggtcggtggagaagtgctgggaggagggaagcagggaaagccactcactgagagcccgggccgcacggccctccgctgcccaggtaacaggggcaggaaaaggaaggcagaacagcggcttggagcggccccagctgtgcgctcatcacagaaaggaaaagagagaccctccaagaccgcagccctgcccacgccccagggcagaggcgacgcagccaagacccagcagaactcaagtctccccttccgccttctcaaggctagatccatgggacttggaagccagtgtgacgcgacagaactgtgcctcacactctggctttagaactcgacctcagtgctgagatccatcaaggccaccgccacttacagaacctcccgccaccatggacgccccatccctcctgctctcgcagccccatgatggacgttctggaaccactcccgggcctcatgtttacaaagagaccgagaggcccatcgtccagggtcacagggatggcaggtggcagagaggacacaaatgagtctgcaaccctcaatgtctgaaactcaatagctggaagacggatacccccagcccctgcccctccccgaggtcccacctatccacctatgttaccgggggaggggagaagtcatagctggaactctgggggtttcccagaaccagccctgctgactgcgaacagcgtcccagcatggagaggctgagaacagtacgtaccctaagacctggaaaagattggggcacaaatccacgctcggcacagccatcacacacggccacacccagagagccacccatggcctgggaagcagggctgccacccgcacctccctgggctgcccagacgagggcgggtgaacagaagggcagcccagggccatgtgtcaggattcgggccacctgcccaggcagcccagagctccacccaccaccccccaccctcaactgcacagcagggtccctcagcagccccctgcgtcacacggaccaatgacctacacactgagccggggctcatgccaactgaaaattgggacccggcccagtctgccggtttagttgctgagatgatgtggggagcgggacagagcacgtggatgcagagaggcagagctgccagatgggcatgtccccaagacaacagcttccttgggatcagagcgcccgggacagcacaccagccaagggaagcgtgtcagctccaaaagcgggcctcgggcgttttgggcgactggctgccaggcttaggtcaggagctgggtacatgcacagacaagggacgaaggaacagcagccaggaaggggtccaaatccatacaggaatgtactttgtgagaaaggtgggatttcacagctgtaagcaaaagacaggtgctctcgacaggtggggctgagaagaaagctgagccaagatctaaaaaaaaaattacatcagctccatcccaccatgttacataataacatgctccagctggatcaaagcttcaaccatggaaacaagcaagcagtcaaggagaagccagaagaaaagctctggaggccgggcacggtggctcatgcctggaatcccagcactttgggaggccgaggcggtcggatcacgagattaggagagcgagaccatcccggccaacatggtgaaacctcatctctaaaatacaaaagttagcccgggtgtggtggcgtgcacctgtagtcccagctacttgggaggctgaggcaggtgaattgcttgaacccgggaagcaga[131 bp omitted]atttctaagaatgaccccaaacccaaaagccatgaactaaaactgacacatttaattatacagagatcaaaaaatcctacacagcaaagtgaccataagcagagccaacatagaagcaactagagggaaacatgtgcaactcatatcataggcaa[210 bp omitted]ggctgagg[170 bp omitted]tgtagaaaggacgcattctcatatgaaacatggccaatccaaaataaggaaagtgcaaattaactctatcctgagatgttattttcacctaccaacaggcgtaaagatcaaagtttggtgatttacagtatggtgagaggatggggacacgggtgcttttgcacacactgctggagtgggtgtgagtctggagagtctatggaactattactattttgttttgttttgtttttaagatgaagtttcgctcttgtcacccagtgtccacgctggagctcaatggcgtgatctgggctcactgcaacctccacctcccaggttcaagcgattctcctgcctcagtctcctgagtagctgggattacaggcgcctgtcaccacgcctggctaatttttgtatatttagtagatagggggtttcactatgttgaccaggctggtcttggaacttctgacctcaggtgatccacctgcctcagcctcccaaagcactggaattacaggcaagagccaccgcgcccagccacttactattttctgagaaagggtctcacttgtcacccaggctggtgtgcagtggcatgattacagctcactgcagcctctacctcccaggctgaagcaatcctcccacctcagccttctgagtagcagggactgcaggtgcacgccaccatgcccagctatttttttttgtttttggcagagacagggttttgccatgttgcccaggctaaagccgaagtttctgagaacctattgatggtgttaagtgaggacttgctgtattggaaaaaaatgctgtggacgtttttattttttgagatggagttttgctcttgttgcccaggttggagtgcaatggcgctatctcggctcaccacaacctctgcctcctggattcaagcaattctcttgcctcagcctcccgagtagctgggattacaggcatgtgccaccatgcctggctaattttgtaggaagttctttctgtattgaagcaaataatacttaaccttttatgaaaaacaaccaggccacgcgtggtggctcacgtctgtaatcctagcactttgggaggctgaggcgggttgatcacttgaggcaaaagttcgagaccagcctggccaacatggtgaaaccccatctctactaaaaatacaaaaattagccaggcatggtggcaggtgcctgtaatcccagctacttgagaggctgaggcacgagaatcgtttgaatccaggaggcggaggttgtagtgagccgagaatgcgccactgcactccagcctgggtgtcagagtgagactccatctcaaaaaaaaaaaaaaagacacctagttgggagagaggagatacagatgcatacacaatggtgtgcctggatttggggtatcagaggaggggcttcactactagcagtggcctctggggactctgggagggatctgtaccacctgggcttccgatggagggtggctcaggcacaggaagctacaggttggggcaggagcacacagggtgccactcaccaagagaatggcctccttgatgcaggcgtcccgctggtccttcctcagggtggccccagtgagcggacaggtgaagtacacgccaggcacagccaggtgggcagagccttcctctctgggctcagatacctggggcggtgaaagcgtccaagtctggaccgtggacagaggccaccccgaccctcgccgagcaccacagtcctgagtgtggcccgtagaaccagacatctccagcccccatgctgtcccttccacctggtggccgtgggagacaccctggccaagtgaccggatccccgagtcttttccctggtatgtcaaatgtccctgtggggcctgctcagaactaaacgaggtaaggaacggaaagtacggagcagcttctgacacgcaggaaacacccagcagatggcagctgggttcctgctggtcctgtccccaagctgttgaggaaggagctctgtgtgggtgtctgcgggcacagtgcgctggacaaggcatgacttctgggcctccatttctaggccatctctaaggtccctgcgtgctaaaattcactgaatcctcgagggtcaagctgcttagaactcctttcagcggagctctgaaggcccacctcctagaggaaggcctccctgattccacccgtctccacagagcctcttgacctccaaggcaggcaggactgggcagtgctaggggacaggctctgaaaccacagactggctctggtcctgcctttgctggtcctggggtgtaggagagaggacagctggtttcacctctctcaaccccggttctctttttgaatagtggaaactgtaactgcatctgcccttaaggggttaaggggagggagcgatgggctcgtgtacctgaggcccacttctccaggcctgagccggcatcctcagctgccgagccccgaaggtcccagacaacaccgtgttccaccacaacctgtgtccaccttgcaaggcaaggttttccaacagcccttgagccccaagggcagaggccacatctcccccgtgacacagtcaagctgtccccaccccttggcatgggacagtgccaccagtggctgttcttaccacgttggtccctggggcctcggggctcccgctgacggtggcttcggcttgaagttcctttctcactggaaggcagcccaagaaagagaggcagagacgggatagtgagcacgccgctgtcctggcccaagccccctcattcccggggtgggcctgggggccacgcacaccgccccagcctgcttctgctggaggtcaggctggaggtcccctgcaggacttgctgtgcagccacccctcagcctgagcaagcaccccactgcctgggcagcccgtttctgctccaagtctctgctcccaccccctccccaggaagctgcccttcccccagcacctgcccttgatgagccgctcccaagggtgaccctcacacccccacggttgctcatgtgacttctgcatccagggccaggcaccagggccgagaacctcaaacagccccaacctgggcccgaggagggccatatctcaccctggtttcggatggtgtcctgcgatgtggggccccaggcccgggactgcttctgctccagccgggctagggcggcagcggctgccatctgtgcctcattggtgggtccctggcggggcggcctgggggctggctggttgggcttctctttgtgggccttttccctgggaacagaccgagggagagtgagtgtatcctcccgaggtggccggcaaagctgacgtgcagtcacacagaggagcttctgcccctccccagcaccatcagccagacgtgtccctgcctatgtgggccaggacacctggttcccaggggccacctgcagccaccagatggttctactgcaggcggaagagcccctggaggaaggagatgctggttccactcagctctgcaccatcgggcaagtcctgcccccactggccctcagcgtcctcatctgtaaaatggggtgacagcacccctcctgaggtgaaggcaccttgacatcctcagtgctttttttctttttgagacagggtcttgctctctcaccaaggctggagtatagtggcacgatcatggcttactgcaatcctgagctcccaggctcaaggaatcctcccgcctcagcctcccaagtcgctgggacttagaggcaagcatcatcatgcctggctaatttttctatcgagacagggtctcgctatgtagctcaggctggtctcgaacttttgcctcaaatgatcctcccaccgtggcctcccaaactgctgggattataggcatgagccacagcacccagcccgcatcctcaggaattgaggagactcaaggggtgtcacatcctccctccctccctgccataagactctccaccctcaggtcacagcttcgtttgctgagcacctactgtgtgccaggaccctgctgggagctggtcggctcgcttggtttactcctcctaacaagctgccagggaggcctcaccatcccattcctaaacccaagagggacaggaagtccgggcgatgtgccccatgccacgccaccctcgtggcgggaccctggggagagcggacagcagaaccagcctcgccctggccactccatgccaggcctagggctgtgcaagtacgaagagctcatggactcgtggctccaccctgttgagccctacaccaaggagagttccgtaacccacgtggcacagtgacctggcagagaagcctcgcagagaagccctttctcccaacctgctcggacgcgtctgtctcacccgtctcctctcaggcccctcccatgaacttacgggctgtgtcaatttctgtgccgtaggtctattaaaaccttctgggaggccaggctctcagttcaagccctatactcctctggctctgcttacatacccgggcagccctccctcctcgtcccacccctgcctatctagtcctcccacagctgagcatcttgggtggaagaggagatgactcatgaagacccaccccggcctcatccgatatctgggtctttccaacaaaatgccatttcccagggcacctcaccccaaccagccatggaccctgcccccctgggcagccacagggacccttctggaacctcagccagggagcgtcagcatcactccactgcacaacgccctcccactgcaaaatcctaaagcttcccttggccagagagcccttcccagcctggcccactgccctcccgtggcctgtctcccctgggctccccgcagttcttcccacaccccagctgctccccactgcaggcccctgcactgtctgcaccttctgcccagaatgttctccgggggagtgggaggaggatgggggtctggaaagggctagagctgccgcagggagagaaggaggggcagatttccccacagctgagtctcactgtgtcctgggagaggccttcccaaaccacctgacggcccctgctcaccctccttggaggccctgggcactcatccaagcactcatcgcctgagcgctcatccaaggtctgttggtttatttgtccatcggctccctctagaaggtgagccctgggacagcagaggccttctcctgtccaccactgcagcctaaaacaggacttggtgcccacccaccccacacaccctggatatgcagtctcgctccacaagggacctccgcaccgcttcctttcccaaccttcccctccaaccttcccctctccgcccaggctctgggctgatccagccatcaccccgataccctgcatccttcctatcatgcccagtcccagtggccccagcaccccccacccactattggttgaatcaatgaagggctcccccgatttgcccccttctctccctgacccctctccctccctcactcagcctttgctctcctgctctcccccaggaaccctgacgtcctcactatgcccctacctccatcaccaccccactgccccgtgattcctgacccccacttcctgccacctccctgcctctcccagcccccactccctcacaatcccttccactattgcttacagacccgtgtcctggctgcctggctgacttcctcagtccctctccatcagtccccaccaccctctggccagccagctccctgcagcggccccagctctccagtttcccttttctcaacccaacagccctcagccttgcaccttccctagctccacttcttccccggccctcccagctggctcagccctgctcaggcccttctctccaagtcctccctagacaatccggaagcctgcccggcatctatctcctttcccctcctctcccacttccataatccacttggcacagtgacgtggcagagaagcctcgcagagaagctctttctcccagcctgctaagacgcgtctgtctcacccgtcttctcctctcaggcccctcccgggtaagagtccatctgtcagaatccctcacctccactctcctcacacaccttcctcagcccctccctctcaattcgccaggacatcccaggtcactgacgacgctgcccaccccggcctccctggccttccagactctttctagtctcccatcagcctcccacgtgctccagataccaaatccagaacccctcttcccatggatacctcaaaacaactcttcaccaccccaccccacagctgtgcgtcctcctccaagctcagctcccatccatggtcacctagattgccccaaatcatcccggcctcttcggccagccgggtccccagacagagctctccctcaccacccggctcaggactcatgatcccgtttttccccaaaggtcgttccactgacccccaactgcctacagccccgtcgccctaatcccccgccactgcatcggaccctcctgcggccccgcccccgagacctcccctcccgccccgccccctgcgctagttcccctcccctcgcctcccccgccgcgcccccgggtcatacccgccccctcctgccccgcccccagatctctctcccctccccctgacgcccaccctcggcccgacttcgtccgcccccggcgcctctccccctcccctgaccctcgcgtgccgctcccagcccctcatcctctccgatctcccgagccgcccaaggccccagatctctctccccggccgtccccgccccgcagggcctcaagcccctgcgttcctcacgcaccccacggactctttgagcttctgaccgggtcccgcgctcttgaacttgatgtcggccttgaactcctgaaagaatttcttcatggtggcggctggcccggcggcggggggccgcgggggcgggggggcacggggcccagtcggggacggggccgccggagaccagccaccggaagaaaattaaaaaaaaaaaaaaaaaaaaaaaaaaaatttacctcgccgccggaagtcccgccttcccctggcctgccacgtgacaatcgactagacgtgcctctctagcgctcggtgccttgctggcccagggcggccgctctgtacgctggagccgcgtctctgtggttcttccggactccgttgccagggcgacgagtgcacctctcgattggagacagggcattccgtggcgctccccaaacggtgacaaacggtgataggacagggacaggccaactgaacctcgcagagaaagcactgggccctatccctttcgctgctcaacctaaactaggcgcggtggctcacgcctgcaatcacagcactttggaggctcaagcggaaggattgcttgatcccagaagttggagaccagcctggcaacatggcaaaacctcgtctctataaaaaaaaaaaaaataaaataaaataaattagccgagggtggtggcgcgcgcctctcagctacttgggaggcagaggcgggaggatcgcttgaacccaagaggtcgaggctgcagtgagctgtgatcaagccactgcattccagcctgggcgacagagagagaccctgtctcaagcaaaacaaaaaaaattccaaccttctctgtctccccagagcttacgtgataaaatcccaattcaatgttgggtattggaggcccccacgatctggcctgttttggtgcctgaagcacccccccgccaccatcaccacgtaccctaggtaggagctgtttaagaggatgcacctgggccgggcgcggtggctcatgcctgtaatcccagcactttgggaggccgaagcgggcggatcacaaggtcaggagatcgagaccatcctggctaacacggtgataccccgtctctactaaaaatacaaaaaattagccgggcatggtggcaggcgtctgtactcacagctactcgggaggctgaggcag[136 bp omitted]ccaattgggacctggggattggggatccactttggtggacaccagttaatagtggcgtactttggtctgtgcaatccacaaagaagatacacaaagtgacagttaaaacaagcctcaaaaaatgggagttgggggtcagacgtggtggctcatgcctctaatcccagcactttgggaggccgaggccggcggatcacttgaggtcaggagtttgagaccagcctggccaacatggtgaaagcctgtctctatgggcaccggtaatcccagctactcgggaggctgaggcaggagaatcgcttgaacccggcaggtggaggttgcagtgagccgagatctcgccattgcacttcagcctgggcaacagagggagactctgcctcaaaaaagaaggagttggaatgagatacacagagactgatggaggagaagcctccaggtgaggaaacagcccaccccaagactgaaattgaaatatcatgggttggacgggtggctcaggcctgcagtcccaacattttgggaggccaaggtgggaggattgctttagcccaggaattggaggctgcagtaagctaggatcacgccactgcactccagcctgggcaacagagccagaccctgtcttattaaaaaaag[134 bp omitted]ttttaaaaaaattagccagccttggtggcgggcgcctgtagtcccagctacttgggaggctgaggcaggagaatggcgtgaacccaggaggcagagcttacagtgagccgagatcatgccactgtgctccagcctgggcaacagagcaagactccgtttcaaaaaaaaaaaaaaaaggaaaagaattgggccaggtgcggtggctcacacctgtaatcccagcactttgggaggtcaaggcgggtggatcacttaaggtcagaagttcaagaccgacctggccaacatagcaaaaccccgtctctattaaaaatacaaaaatcagccgggtgtggtggtgtgtgccagtaatcccagctacttgagaagctgaggcag[147 bp omitted]cccaaacttcaatctttctgatctccagtctcctatctatgaaatggggataagaataacactctctatagattgtaggggtgatcatgtgattagaaagttctcagtatgccgggcacggtggctcatgcctgtaatcccagctactcaggaggctaaggcaggagaatcacctgaacttgggaagcagaggttgcagtgagccgagactgcgccactgcaatccagcttggcaacagagcaagactccgtctcaaaaagaaaagaaaagaaaattacagctcattgttgtgaataaggaattgtataccctataactcaaataaaggtacaacactgggccaaagtcacacagctggaaagtggcagagacccatcccacttctccaagaataaaatcctatggggttcctcagcctggtctaaggagatcctaacattaataggccctaataaatttctatttcaggttctaagtattctgagggtttcagaaaccccgtttcttgttatcacccacctttccacctctgcctcagttacctggaagtatttccagctcacctctgggcctttgcctaggcattctcctttaccagaagggacttctcttcctctgcctaactcaatcctcttccaccatgacgctctcctggactatcttcctcatgtcggatgaggttatgagattaaataatttaacatttctgccaggagcggtcggtggctcacaccagtaattccagcactttgggaggacaacatttatttttcttttcttttcttttcttttttttttttttgagatggagtctcgctctgttgcccaggctgcagtgcagtggcacaatcttggctcactgcaagctccacctcccaggttcacaccattctcctgcctc[212 bp omitted]tcttccccacgctggagtgcagtggcacaatcatggctcactgcagcctagaacttctgagctcaagcagtcctccccactcagcttcccaagaagctgggactgcaggcatgtgccaccacactcagctaattttttttttttttttttttttgagaaggaatttcgctcttgttgcccaggctgtagtgcaatggtgcgatctcggctcaccacaacctccatctctcggattctcctgcctcagcctcccgagtagttgagattacaggcacccgccaccatgcctggctacttttttgtatttttagtagacacagggtttctccatg[136 bp omitted]ggctcacgcctgtaatcccagaacactggggggccgagggaggaggattgcttgagccctgatgttcaagaccaggatgggtaacatagtgagaccttgtttctactaaaaaataaaaataacaggccaggcacagtggctcacccctataatcccagtactttgggagtctgaggtgggtggatcacaaggtcaggagttcaagaccagcctggccaacatgatgaaaccttgtctctgctaaaaataaaatacaaaaattagctaggggtggtggcagcacctgtaatcccagctactcaggaggctgaggcagagaatcgcttgaacccgggaggcagaggtcacagtgagccaagatcatgccactgcactccagcctgggcaacagagcaagcctccatctcaaaaaataataataataataaataaaataaaaataacaccctgggcaacatggcgaacccttgtctctaccaaaaaaaaaaaaaaaaaaaatcagtgctggttgtgcctccctgtaatcccagctacttgggaggctgaggcatgagaattgcttgaacctgggaggcagaggttgcagtgagctgagatcatgccactgcattctggtttgtgagactctgtctcaaaaaacaaacaaaccaaaaattagtgaggcatggtggtgcgcacctgcagcttcagctgcttgggaggctgaggcaggaggagatcgagaccatcctggctaacatggtgtaaccccgtctctactaaaaatacaaaaaattagccaggtgtggtggtgggtgcctgtagtcccagctacttgggaggctgaggcaggagaatagcgtgaacctgggaggtggcgcttgcagtgagctgagatcgcgccactgcactccagcttgggcgacagagcaagactccgtctcaaaacaaaaaacaaaaaacaaacaaacaaacaaaaaaccattaaaagataaactcggccgggcgtggtggctcacacctgtaatcccagcactttgggaggccaaggtgggcggatcacgaggtcaggagattgagaccatcctggctaacatggtgaaaccccatctctactaaaaatacaaaaaattagccgggcgtggtggtgggcgcctgtagtcccagctactcgggaggctgaggcaggagaatggcgtgaacccgtgaggcagagc[131 bp omitted]gtattatactgatggggtctcgctaggttgcccaggctggtatagatctcctggtctcaagtgatccccctcaacctcccaaatcaccaggattagtggtgttaaccacctcgcccagcgtttgattgtaaagctgttggaactttaaattattcttcttattattatttttgagacggagtttttgctcttgtcacccaggctggagtgcaatggtgtgatctcagctcattgcaacctctgcctcctgggttcaagcgattcccctgcctcagcctcctcagtagctgggattacaggcacacgccaccacgcccggctaatttttgtatttttagtagagacaaggtctcaccatgttggccaggctggtcttgaactcctgacctcgtgatccacccaccttggtctcccaaagtgctgggattacaggtgtgagccaccgtgcctggcccaaaaattttttatacagatgtggtcttcctatgttgcccatgctggagcacaactacagtggccattcacaggcacaatcatgggtcactgcagcccagaactcccaggctcaagtgatcctcccacctcagcctcccaagtagccgggactacaggcatgagtcactgcacctagcttaaccattgcaacctccgcctcctgggtttaagtgattctcttgcctcagcctcccgagtagctaggattacagccaccacgcccagctaatatttgcatttttagcagagacagggttttaccatcttggccaggctggtctagaactcctgacctcctgatccacctgccttggcctcccaaagtgctgggattgcaggtgtgagccaccgcgccccgcaattttttttttttttttttttttttagaaagagtcttgctctgtcacccaggctggagtgtagtggtgcaatctcagctcactgcatgctctacctcccgggttcacgccattctcctgcctcagcctcccgagtagctgggactacagatgtccaccaccacgtccggctaattttttttgtatttttagtagagatggggtt[132 bp omitted]ggcctcaagtacattcgcattgttgtgcaaccattacagcaatcgttacatttcatctagtgaaacgtaaattctgcctaattaagtaataactacccccaaccctgataacctctagtctacttttcgtctctatgaatttgacaaccctagggacctcttatgagtggatacatataagacagtacttgtctttttacgtctggctgatttcactgaggatatcgtcttaaggttgcagcctgtgtaacaaatagtttttaaacgatactgcaggccgggcacggtggttcatgcctgtaatcccagcaatttgggaggccgaggctggtggatcacttgaggccagcaattcgagaccaggctggccaagatgatgaaaccccgactctaccaaaaatacaaaaatttgccaggtgtggtggcacgtgcctgtaatcccagctactcgggaggctgaggcaggagaaacccttgaacccaggaggttgagattgcagtgagccaagattgtgtcacagcactccagcctgggtgacagagactccgtctcaaaaaaaaaaaaaaaggaaaaaaaagatattgcaccagccttggcaacatggtgaaatcccatctctacaaaaaaaaaaaaaaaaaaaaattagcctgccatagtggcacacacctttagtcccagccacttgggggactgaggcaggaagattccttgagctcaggaggtcaagcctgtagtgagccaagattacaccactgcactccagtctgggtgacatagtgagactgtttctcaaaaaaaaaaaaaaaaaaaaaaaaaaattgcatggggccgggcaaggtggttcatacctgtaatcccagcactttgagaggtcgaggcaggagggctgcctgagctcaggagtttgagaccagtctgggtaacaaagtgggatcccatctttataagaaattaaaaattaaccaggtgtgctggcacatatctgtagtccaagctactcaggaggctgaggcagggggatcacttgagcccgaagtgtagaggctgtagtgagctgagatcatgtcactgcactccagcctggtcaggacagcaagatcctatctcaaaaaaaaaaaaattcttggccaggcgcggtggctcacgcctgtaatccagcactttgggaggccgaggcaggtggatcatgaggtcaggagattgagaccatccagagaggccaacagggtgaaaccccatctctactaaaacacaaaaaattagctgtgcttggtggcgcacactgtagtcccacctactcgggaggctgaagcacgggaatcgcttgaacccaggagtggaggttgcaatgagccaaaatcgcgccactgcactccagcctggtaacagagcaagactctgtctcaaaaaaataaataagctgggtgtggtggctcacgcctgtaatcccagcacgttgggaggccgaggtgggcagatcacgaggtcaggagttcgagaccatcctggcgaacacggtgaaaccccgactctactaaaaatacaaaaaaaaaaaaaaattagccaggcgtggtgcctgtagtcccagctacttgggaggctgaggcaggagaatggtgtgaacctgggaggcggagcttgcagtgagctgagattgcgccactgcactccagcctcggcgacagtacgagactctgtctcaaaataaataaataaataaataaataaataaaatgcatgggagatatttatactaagaaatcattcagccagatgttgtggctcatgcctgtaatcccagtaatttgggagactgaaatgtgaggatctcttgaactctgatgttctagatcaccttgggtgacataagtgagacgctgtctctaaaacaaacaaaatcatgtgatgtgtatctgctcttcagatgtaacttgacatcctgaattttaactggaaattctaactatagcccttctcaatgtagcaggctaaaggatctttttaaaaaaaaaaatggctttggccaggtgcagtggctcacatctgtaatcccagcactttgggaggccaaggcgggcagatcagaaggtcaggagatcgagaccatcttggctaacacggtaaaaccccgtctctactaaaaaatagaaaaaattagccgggcgtggtggcgggcgcctttagtcccagctagttgggaggctaagacgggagaatagcgtgaacatgggaggcggagcttgcagtgcgccgagatgtgccactgcactccagcctgggcaacagagtgagactgtttcaaaaaaaaaaaaaaaaggctttatttattttttgagatggagtctcactctgtagcccaggctggagtgcagtggcacgatctcggctcactgcaacttccgcctcccaggttcaagtgattctcccgcctcagcctcctgagtagctgggattacagcgtgcgccaccacgcccagctaatttttttgtatttttagtagagatagggtttcaccatgttggtcaggctgatcttgaactcctgacctcgtgatctgctggccttggcctcccaaagtattgggattataggtgtgagccaccatgccccgtctgtttatatatatatatatacacacacatatataatatatacacacatatattatatatatatattatatatacacatatataatatatacacacatatatatacatatatattatacatacacatatatattatatatacatatattatatatatacatgttatatatacatttatattatatatacatatatattatatatatacatatatacatatatgtatattatatatacacatatattatatatgtgtgtatatatacacatatattatatatacacacatatgtaatatctaatatataaacacacatatataatatattatatattatatatttaatatatgtattatatataatatataatatatacaatatataaatatatattaatatataatatataaatatatataacataataatatataaatatttaatatatatttatataaaaatatatattatataatatataatatatattatataaaaatattatatataatatatattatatatatatttatctacatacaatatatatatatattttttgagacagagtctctctgttgcccagtctggagtgcagtggcaccatctcggctcactgcaacctcagcctcctgggttcaagcaattttcctgcctc[134 bp omitted]gcctcccaaagtgctgagattacaggcgtgatttatttttaatacggacagtcttgctatgttggccagggtggtctcaaactcctggcctcaaacaatcctcccgcctcaagtgctaggattacaggtgtcagctaccgtggtcacccagctttactgatatataacttacataccatcaatttcacctctttcagtatataattcaatgaagtttatcatgtatttacagaattgtacaaccatcatcacaatctaaatttagaaagcttgcatcatcctaaaaagacacctcaggctgggcttggtggctcacaccagtggatcacgcttgtggctcactttgggaggccgaggcaggcagatcacctgaggtcaggagttcaagaccagcctgcccaaaatggtggcacacaccaccactccaggctaattttttgtatttttagtagagacagggttttaccatgttggccagactagcctcaagctcctaacctcaggtgatctgcctgccttggcctccaaaaatgctgggattacaggcgtcagtgactgcgcctggtcagccttcttaaaggccatatctccaatatggttccatgggaggtctgtgcttccacatacacatttgagaggacggtacaaaattcagtccctagcaggtaggaatggaattgctgggtcatatggtaagtctatgtattttctttttgttcttgttttcagacagagtcttgctctattgcccagactggagtgtattagcacaatctcggctcactgcaacctctccctcttgggttcaagcaatcctcctgcctcagcttcccgagtagttgggattgcaggaatgtgccatcacacctggccaatttttttggtat[161 bp omitted]tctcctgcctcagcctcccaagtagctgggactgcaggtgcccgccaccacgcccggctaattttttgtatttttagtagagatggggtttcactgtgttagccaggatgatctcgatctcctgacatcgtgatccacctgcctcggcctcccaaagtgctgggattacacgcataagccgcggcacctggcctatgtttaatttttattttatttatttatttttttgagacgaagtctaactctgttgcccaagctgcagtgcagtggcgcaatctcggctcactgcaaccgccccctccgggttcaagcgattctccctgcctcagtctcctgagtagctgggactacaggcacacaccatcatgcccagctaatttttgtttttcagtagacatggggtttcacta[139 bp omitted]atggagtgcagtggtgcaatctcagctcactgcaaccattgcctccctgggctcgatcctcattcctcagcctcctgagtagctcagagtagaagtgtgcggatcatgcccaactgatttttatattttttgtagagatggggtttaaccatgttgctcaggctggtctcgaactcctgggctcaagcgaattttccacctcagtcgtgctgggattactggtgtgagatgccatgccaggccttacgtttcagttttaaagaaatggtctttgttgatccatatttcacatgcatagggatgttttttgagaataaaatactctctttgtatcctctgatcagatccccccaatagtttcccaagaagttaaaataaaacccaaacttctcatttatgtttgtaatgtattgtgataggtcctctacggacccctccagccctccagctttatctgtttcccctactcacacacagtcatcctaggatcagatgggttttttgttgttgctgttgttgttcttgtttttgcttgtttgctttttcttttcttttctttttttttttgaatcaaagtctcgctctgtcacccaggctggagtgcagtggcatgatcttggctcactgcaacctccgcttcccgggttcaagtgattctcgtgcctcagcctcccgagtagctggaattacaggcgcctgccaccacgcctggctaattttttgtatttttagtagagatgcggtttcaccatgttggccagggtggtctcaaactcctgacttcaagtgatctacccgcctcggcctctcaaagtgttgggattacaggcgtgagccaccgcgcccggtctcgtttgttttttgcaacggagtctcgctctgtcacccaggttgtagtgtaacggcgtgatctcggctcactgcaccctccgcctcccaggttcaagtgattatcctgcctcagcctcccaagtagctaggagtataggcgcccaccaccacgcccggctaatttttgtattttttctagagatgggatttcaccatgttggccaggctggtctcgtactcctgaccttaagtgaggatcagacgcttgtttttgctcttccctctgctcctcatgccctcccagggctcgcctcactatcatgtccaacttctattcattctcccagtgtctggttaaactcacttcatccagtaaccctctgtgatcccccaggagagaagaagtcgtctccattattcagctttttttcctcaagcaccctggttcattttagttcttaccatggatcctaattacaaaaaacaaaacaaaacacagcaacatcaacaaattttaaaacttaacatttcttggccctgttatacttgattcctggaaggtagagttttgttttttgtttttgttttttttttgagacagagtctcgcgctgtcgcccaggctggagtgcagtggcacgatctcggctcactgcaagctccgcctcccggggtcaggccattctcctgcctcagcctccctagtagctgggactacaggcgcctgccacc[185 bp omitted]ccagtctggagtgcagtggcgcgatctcggcttactgcaaccccccgctcctgggttcgagtgattctcctgc[134 bp omitted]gtcctctcaaagtgccggggttacagccgtgagccatcgcgtccggccgagttatagcttctaatacttcctgtatttcctgttgccgggctcagtctagagcagggtcctcacaatcattatgggccccatcttccaagtgcagagagcgaagcccaggacaatcaagtgactcggccccacggtattcagtacatttttcttgaatgaatgaataggtctgtgtggcgttttggggccctggcatatagtaggtactcagttaagtttttaactaagtgaagaaataactattttgtgcattttgtggctgtttatactaagagctcccccggagcctgccccttcctctaagtcccgcctcctcgagctggcaatcgcccgtccctgttttatgttgtatcgctcttctttcgatagccaatggccgacgttcccgctgaagccccgcctcttgtgatggccaatgcctgctccctaccttgaggcgcttctcttgtggtatccaatggcttgcatatctactttaagcctctcctcctgagcgggagaggctgtcaatgacccgcccattgcgttaagtgattggccttcttttctgcggtatccaatgttctgccctccttatatccccttctcttgtggaggtctatgtcctgcctctttcccttaagctccaccccttcactcccttagagcgtctgttcgtctcctcccacctttccctttcacctcccataacctcccattagagtctctgggttacgccccttgggtctgtccgttatccaatcccgttaactgctgtgctccaacctctgttcttattggtcgcctcccttctctgtcccctgcacgtggtcctgatcgacggctttgccggcccgtgacggccggagggctgaacttccgttggcgcaacgcccaataagcgcgcgtcggcaggctgcccagacagcctcccccgccccctcggcgtcccgctcccgcccccggcttcgcctcccgctgccgccgccgccgccgccgcagccgctaccgccgctgcagccgctttccgcggcctgggcctctcgccgtcagcatgccacacgccttcaagcccggggacttggtgttcgctaagatgaagggctaccctcactggcctgccagggtgaggccgcgcgggagatggggccggtgggggggggggggggggcagcgggggccccgggccggaggcgggcactggagggccggggttgtcctgggcctgaaggagctgcgccccgggggtctggggttcatggggtctgggggtgtccgagacccgcagcggccccgccctgggggtctgggggtcctgggccgcagggagctgcgccctaggggtctggggttgtccggggcctgccggagccgcgccccggggtctagggatcctgggcctcagggagccccgccctcggggcctgggggtcctgggctgcagggagccgcgttcttgtggtctggtggtgttcggatcctgcaggacccgccgtctgggcctgcaggagcccctcccggggtctgggggtcctcggcctcagggagctgcgtcctggggttctgggggtgtccaagccctgcaggagccgcgccccggggtctgggggccctgggcctcagggggccgcgcctaggggttctgagggtgtctgcggcctgagagactctcgcccttggtgtatgagggttttggggctcagagagtcgctccctgggagtctgggggtatcctgggcccgagggagtcgcaccttgggggtttgggggtgtttggggcctgaaagagccgcgcgccgacggtctgggggtcccgggcccgaggaagcggtgccctgggggtctggggcctgataaattctcactctgggggaatggcggtcctggacctgagggagctgcgccgtggggatctggggggtgtccagggcctgaaggagctgcggcgccaatggtctgggggtcctgggcctgaggaagctgcgctctgggggtctggggcttctgtgcctgagggagctgcaccatggggatctggggttgccctggcccagagggagccacgcctcgtgtgtctgggggtgtccagggtgcctcagggagccgtgcgcagggtgtctgggagggtctgggacctgagggaccctcacctgagggcctggggatcccaggcctgagggctcaaggttcaagtttgagcagaactgcggaacttgagatttggggtcagatatgggggctgaagcactcccttgtgggtcctggagaagcccagttttgaggggctggggggccgagggccatgtgctaggggtccagggttggaggaggcagtcaggggggaaggttgagggtcaaggctaagggaagctgggacctctgagtgaggggctgggggtgggggaatggggctcggggctctgttcacggggtcactgggactcggggaactggaccttagaatgaagttggcatcgggactgttgggggaccctggggattggtcccctgtggggaggaggatgtagaagctggttttggagggacttgagggtggggtggtccaaccccaatgcttgaaatggagacaggcccgggcccagggagtgggagcgcttctgagggaagggggctggccgaggggaccttggatgcccctttggtggaagctggggtcccgacgacctggatagtcccaggtgtcctggcctgaaggatattccgcaccttggagtcccaggtgtggagggggtgagttccaggccctgagaggtacaggccagcgggaagcagggaccccaggctattgtcatccccaggtcttagggctgagtctcccagggctgaggttggtggaatttgccgggcaggactgaggaatttggcactgggggtggaaggctggggcagcagggaggggctgtggagggggacaccaaacggtgctctggaccagaaccagcccaggtccgaagctggcaatgccgctgggatgggtgggcctcggaggaccgtgggcgggtcttgggagaagcggggctgtgaggcatgccgggctggtcctcgggtggactgaatttaggatgcttctggcgggagagggatgctgggcctggcggcccatggccgagcccaggggccagggactctgataaagtagctctgaggagacccaagcgagaaggaagctgggtgagtggggcagggaagatcgggagccccctagaagctggagacgtggatggggaaggaatgcattgggaggggagaagccactccagcctgctgtgctcgcgctgactttcttgggggagaccagagcaatgcaactttataggcacttccctccctttcccagctctcttcttcccagagcactcgcttttctctcccccgtccccccttctccagcctgctctcctagccccaaacgtttccaagcacctgattggaagtgaaggggctgttagtctcctgtggggaggtgactgacagctgccggagcccatgggcctgcagggagagggtgggacttcctggatgctcagggccgtttcttgtagcccaccccccaccctctgcatccttggagctgccagctgcatcctctgggggaccgcccgtgagcccctctttgcgggaggggtccccaggaaaggtcctgggagtccatagacgctgagcttggccccaccccctggttgcttcagagggccggatctggctttgctcaggtggagcacctgccctggggccagctccgtccctggggtagggggagagctctctgggtggggcacagctttgcagtgaagggtacacagaagaatgcagcttcccatcgggaaggggctgctgcttcctgggttgaaggctcccctcctcccagcgtgatttgccccaagtaacttggctgatttctcggtgatttcctgggtcagtgggtaaagccaccccctcactggcctctcactgcagatcgacgacatcgcggatggcgccgtgaagcccccacccaacaagtaccccatctttttctttggcacacacgaaacgtaagtgtccccttctggggcttggttttctcctctggtgcctcccggggtggcctcactcacctgggactggcccccgtttcccttctccagagccttcctgggacccaaggacctgttcccctacgacaaatgtaaagacaagtacgggaagcccaacaagaggaaaggcttcaatgaagggctgtgggagatccagaacaacccccacgccagctacagcgcccctccggtgagtacccggggtggagagccagtgtgaagcgcgctactgatgcaagaaggggcctccagttagggtctctcccctgggcactgtggacacatggggctcgatcgttccctgtggtggggcattctgggccctgcaggtgctgagcagtgtccctggcctccacctactcagtgccaaggccacccccaccccattcatggtgatgacagatgtccccagtcattgcccagtgtcccctgggtggaggggaacggg[136 bp omitted]ctcctgtattcccgccattctcctgcctcagcctcctgagtagctgggactacaggtgcccgccaccacacccggctaatttttttgtatttttaatagagacagggtttcactgtgttagccaggatggtctcaatctcctgacttcgtgatccacccgcc[134 bp omitted]acctctgcctccgggtccaactgactctgctgcctcagacgcccgagttgctgggattacaggtgcccaccaccacacccagctaatttttgtatttttggtagagacagggtttcaccatgttggccaggctggtctcgaactcctgaactcagatgatccacccgcctcggcctcccaaagtgttggggttgcaggggtgagccactgcgcttggccagcccgaatttctaacagagtgttatcatagctctcataaaaccttttattttcttaggaaaagacgtttttttcttttgagaagagccccctctttcactgttactgccagattttagaggagtgaaaagtctgtagtgtgtagatgtgagcgttctcagtcaggtggaaaaaaacaccaagaatcagatgacatctcattggcaaatgagtgtctggaaatagtcagggaaaggaaggaatttagaaaagcggaaggcaaatggctaaaaggcagtggaaggatgggagaaaggtgccttactctgagtattctggggtgaggtggggagtgggggaactgggctggggttctttcctctgctttaaccacactgcttttgaggtttctgtgacaggctgggggccggggttagtagcccaggcttagctgggggggcatgaatttggcggggaggcccagggaactgaccacaagctagggaaaacttggccattaaggaagaaaagcacatccgaggtggtctgagtggagcaaggcaggaggggcccagcctttggcttttgcgagtggaggatgcagtctctttgtggttcctggtcctgtttgagaacctggggtcttgaggtggcctgtctgtgcctctcctttgtttcggcctgggctgggtggtgcttgtgagcatttgctccaggatccgcagacgtttcggtggtgacacctgccacgcacacgtgccgcactggggaccaggaacagggatgagtcaggcacagtccttgccttctgggagctcatggtccagaattgaggattcactcaacggatgtcccttgagcgccgaggatctggcagccccttctcagggggccggggcccaccgatgttgcatgctgagggtattttactttaacacccatggtgtgtctaggagactgaggtttccctggtttcatacttgctatctttcctcacgctgtgcctgtccccagcctggaaggataggtcagaaatccttcaaggtagctgtttcaggagatctttttctggccccaggtcaagttctctttggttccgtcctgagctcattacctcctggtgaatcatcacaccatttaatatttattggacacctacagcttgctaagcattatatagaggcctgtctttgaggaaaggaaattaaacaagccctgtacagatcccccaagatgagaagtagctttagttgaggccactgctgctcttagcttctctggcccatctatgcttctagatggaacgtgtgtttaagatgcagattcctggctgggcactgtggctcacacctgtaatcccagcactttgggaggctgtggctggtggatcacgaagtcaggagttcaagaccagcttggccaagatggtgaaacccagtatctactaaaaatacaaaaattagctgggcgtggtggcaggcgcctataatcccagctactcgggaggctgaggcaggagaattgcttcaacgcgggagggagaa[132 bp omitted]gatgggagccctgaagtttttcttgccaa[136 bp omitted]ctgcctcagcctcccgagtagctgggactatgggcgcccactaccatgcctggctaattttgtatttttagtagagacgatgtttcaccatgttggtcaggctggtcttgaactcctgacctcaggtaatccgcccaccttggcctccaaagtgctgggattacaggtgtgagccaccacacccagcccaggctcattcttttaacagccttagcgcaactactaatgccaccaagagcggacaggaaggcctgggtcccatccccttgcgaagccagtaggtgaaacatggcagcttggcctggttccacttgcatcgccttttggtcctcacagtaatcctcagagtggcccaggtgggtagttggttggttggtttttttttttcagacggtgtctcactctctcgcccaggctggagtgcagtggtgcgacctcggctcactgcaacctctgtctcctgggtttaagtgattcttcttctgcctcagcctcccaagtagctgggactacaggcatgtgccaccacgcccggctaattttttgtatttttagtagagacgggtttcacca[139 bp omitted]ctcaaggggttgctcagatgggccaggcatggtggctcacgcctgtaacctcagcactgtgggaggccaagggggcagatcacttcaggtcaggagttccagaccagcctgttcaacatggcgaaaccccattctaccaaaactacaaagattagccgggctcacgcctgaaatcccagcactttgggagactgaggaggggtcacctgaggtcaggatgtcaagatcagactggccaacagaatga[136 bp omitted]cctgtctctactaaaaaaaaaatacagaaagttagccgggcgtggcacctgtagtcccagctactctggaggctgaagcaggagaatggcatgaacccgggaggcggagcttgcagtgagctgagctcccaccactgcactccagcctgggcgacacagcgagattccatctaaaaaaaaaaaaaaagaaagaaagaaaccccgcctctacccaaactacaaaaattagccacgcttacacctgtaatcccagcactttgggaggccaagagggtgggtcacctgaggtcaggaggtcagaccagcctggccaacacagtgaaaccctgcctctacaaaaatataaaaattacccagatgtggtggtgggcacctgtaatcccagctactctacaggctgaggccggggaatctcttgaacccgggaggcggaagttgcagtgagctgagatgctgccactgcactccagcctgggcgacagaatgagactctgtctaaaaaaaaaaaaaaaaaaaaatttgcttagatgcccagagggacccagctggtgtctgaagccttgtagacccaggccacggtttctcagcatcagtaccttataagagagtatagcagtgacagttggggccaggtcattctctggcatagggtctgtcctgggcattgcagggtgttgagcagcatctctggcctctgctcactccatgcaaggagcgcccactggtaatcttgatgaccaaaatgtctctagacatttgacctagaaggatcccacctaatacatccttgttgcttggtagatgaagaggtagagagacctgtccagggttctcaagcttgtgagcaacagagctgagctggggtcagaaaccagggcccccagcttgcaggtcccccaactcccagatcccctgactccctggccccccagctcccaggctggcattcttttccttctggctggtacaagccaggggcaggccctggaggatgggagtc[132 bp omitted]gaaaccccatctctactaaaaatgcaaaaattagctgggcatggcggtgggtgcctgtgatcccagctactcgggaggctgaggcaggacaatcacttgaacttgggaggtggaggttgcagtgggctgagattgtgccattgtactccagcctgggggatagagtgagactccgtctcaaaaaaaaagtgggagctggggccaagagcctgttgtatgagcgggtggacctgggagccaggcctggctctgccctgtgctcactgtgaatcttgaccattgacatcccctctgtgagcctcagtttccttattttttattattttttatttttttagactgagtctcactctgttgcccaggctggagtgcagtggcatgatcttggctcactgcaacctccacctcccgggttcaagctattctcctgctttggcctccctagtaggtgggattacgggcatccaccaccaaacccggctaatttttttttttttttgagacaagagtctcactctgtcgcccaggctggagtgcagtggtgcggtctctgctcactacaagctccgcctcctgggttcacgctattctcctgcctcagcctcccgagtagctgggactacaggcgtccc[137 bp omitted]gcctcccgagtagctgggactacaggcgcccgccaccactcctggctaattttttatatttttagtagagacggggtttcaccatgttagccaggatggtctcgatctcccgacctcgtgatccgcccgcctcgg[135 bp omitted]gcatcccaaagtgctgggattacaggcttgagccaccgcgcccggccaatttttgtattttttagtagagatttcactatgttggccaggctggtctcgaactcttgacctcaggcagtcctccttccttggcctcccaaagtgctgggattacaggcatgagccaccgtgcccggccctcagtttcctcatctaaaacagaggatttggtagtgctgacccctcagcgggctcctgggagagtccggtgagaaattgcacatcgacacttaggaagcgctcactggatggtggaggggatatttgggaacagagaggcaaagctggatttgaccttcccttttccaatttagtcacaccccctgccctgatcctccaagacagctacagaaatgagctgttcccctcactctcagccggggggactggaagttggctggctttggccttttttttttttttttttttttttgagatggagtctcgctctgttgccgaggctggagtgcagtggcgcgatctcggttcactgcaagctccacctcccaggttcgcgccattctcctgcctcagcctcccacagtgctggaattacaagtgtggcttactgcgccctggccttgttttttctttctttctttttttttttgagatggagtctcgctctgttgcccaggctggagtgcagtggcatcatctcggctcactgcaagctccacctcccaagttcaagtgattctcctgtctcagcctcccaagtagccgggactacaggcgcacatcaccacacccagctaatttttgtatttttagtagagatggggtttcaccatattggccaggctgatctcgaactcctgaccttatgatccacccctatcggcctccccaagtgctgggattataggcgtgagccaccgtgcccagccattatttttttcatagagacaggcaacactttgttgcctaggctggtcttgaattcctgggctcaagtgatcctccttccttggcctcccaatttgccgggattacaggagtaaaccacgggccctgctaaaggaaagatttttaatgaggagtggctatgacccaggcttcgaggccaagacctgctcgtgctttcatctcagatctgcagttactcgctgtgtgatcctgagctgttacttgacctctccctgccttttttcctcatctgcagaatcaggctggtcatgcccaccggttacatggggcattgataagtcctataactgccggtggctcctgggttcgtggcactcaccagctcctcctgtggaagatcctggggcatcagggttgggtcaggggcggggctgggtggagggagcgaccaggaaggagcccggggctcctcattctctgagctgctactccccacccccagcgcttgtctccttaccagggatgctccaaagagaaaccccaggtacgcgagcccttccccaaaggctctgtggagaggcgtgatcgagattggccgcgagagcgttattactctcagcgttctccgtttgcggcctgacctacttagtattaccctttttaatcttgtcaaaaattacacagacagggccctgtcgcttgggccacgaagacacaagggagacaaaacgtgctcgggccgagcggtgacgcttcaccacacccggttctcgttttccttgtgtgctgattgggggccgctagcctgcggctgtgcgcacggaggctggtgtgcgcctgctgtgggctcccagcctctcctcccggcgcgggaggaccaggctaagcctggagggagccgggaaactgaggaagggccgaggttccctcctgtggttccctcctcctggccccccctcttgaccagcgctgacgccctcattcctcaggccatgcttccattctgtccgggcatttctactcagacgctggcctcgcctgcagcatccgcccagccctgcaccgtgtactccctgctccctcttgcccggccgcaacacccggtcacaaacgtgggccttactctgcctgtccttcctggcctcgtctcccgcgagccccgtgacatgcctctcacccattctcacacccttatctcctccaccttgctctctcctggacaccatgcgtgccccactccagcctgtcacacgccattttggtcatcacaccaggagaatgggacttaattgtttcatgattttttttttttttttttttttgagacagtcttgctctgtctcctaagctggagtgcagtgacgctatctgggctcactgcaacctctgcctctcgtgttcaagcgattctcctgcctcagcctcctgagtagctgggactacaggcacctgccaccacgcccagctaattctttgtatttttagtagagatggagtttcattgtgttagccaggatggtcttgatctcctgacctcgtgatctgcctgccttggcctcccaaagtgttgggattacaggcgtgagccactgcacccggcctttttttttttttttttttgagacagtgtctgtcacccaggctggagtgcagtggtgtgatttcagctcactgcaatctctgcctcccaggttcaagtgattctcgtgcctcagcctcctcagtagctgggactacaggcgcctgccaccaggcccggctaatttttgtatttttagtagagacagcatttggccatcttggccaggctggtctcgaactcctgacctcaggtgatccacctgcctcggcctaccaaagtgctgggattataggcgtgagccaccacgcccggcctgttttattattattttttttcccatcgagataacttcaccattttaatcatttaagagtataccgtacagtagcttctagtacattctcagtgtaccattcttgctaattccaggatattttctttttttttgagacagagtcttcgctctgttgcccaggctggagtgcagtggtgcgatctcggctcactgcaagctccacctcccgggttcacaccattctcctgcctcagcctcctgagtagatgggactacaggcacccgccatcacgcctggctaatttttttttttttttttttttttgacacggagtcttgctctgtcatccaggctggagtgtagtggcacaatctcagctcactgcaaactccgcctcctgggttcacgccattctcctgcctcagcctcccgagttgctgggactacaggcacccgccaccatgcc[169 bp omitted]tttcactgtgttagccaggatggtctccatctcctgagcttatgatccacctgccttggcctcccaaagtgctgggattacaggcatgagccactgcgcctggcccaggatattttcaacgcttcacaaaggaatcctctacctgctaggtatccccccaattctcttctcccctcaagcctcaggcaaccatggatccaccttctatctctctggatgggcctgtcctggacatttcatagaaatggaatcacacactgtgtggccttttgtgtctcacttctgtcagctgagcgtggcatcctcaaggttcatccatgctgtggcctgggtcagagcctcgtttcttttcatggccaagtcatattctatcctattgttataccacgtttgtttatcagttaacggacatttgggtttttttcagagaatgtggcttttaaaaatctcagttttggccaggcgtggtggctcacacctgtaatctcagcactttgggaggccgaggtgggtggatcacgaggtcaggagattgagaccatcctggctaacacagtgaaaccacgtctcaactaaaaaaatacaaaaaaaattagccaggcgtggtggcgggtgcctgtagtcccagctacttgggaggctgaggcaggagaatggcgtgaacccagcaggcggagcttgcagtgaaccgagatggcaccactgccctccagcctgggcgacagagcgagactccgtctcaaaaaaaaaaaaaatctcaatctcgtggggtgcggtagctcacacctgtaatcccagcagcttgggaggccaaggtgggaggattgcttaagcccaggagtttgagaccagcctgggcaacatggtgaaaccccatgtctacaaaaaaaaaatacaaaaacgttagccaggtgtggtggtgcaaacctgtagtttcagctgctcaggaggctgaggtgggaggatcacctgagcccaggaagttgaggctgcagtgagtcgtgatcgcgccactgcactccagcctgggtgacagagtaagaccccgtctcaaaaaaaaaaaaaaaaaaacaacaaccacgaaaactcaatctctctctgtcttcttaaaaaaaagcagttatttagaaaagaagtgacgggcaatcactcggtcaggtgttccacgctggcaaggctggcctgtgtgctgcttggtgcctgtgctgggagctgtggcagcacagcttgagcttgttgtaactgcgtggacttgtctgtctccccggtagaccatgagctccctgacagcagggactgcgttttagctgtttctatccccagtgcccagcacagagctgggcacatagcaggtgtgtcatgatgtttgttggaggacctagcaggtgtctcatgatcatcactgaatgaatgagtaatggggctgaggcaggagaattgcttgaacccgggaggcggaggttatggtgggccgagatcatgccattgcactccagcctgggcaacaagagcgaaattccatctcaaaaaaaaaaaaaaaggaaaaatcgcaatctctgccaagcacggtggctcactcctgtaatcccagcactttgggaggctgaggcgggtggatcacgaggtcaagagattgagatcatcctggtcaacatggtgaaaccctgtctctactaaaaatacaaaaaatacacctggcgctcatacattttcctcccacaagcatgagccacccacggcctaactcttcatcctcctcttcaccatctccacccgcttctctgtgccccatatgggtatatgtcagcttcttctggttcccaaggggaccttcactggtgccattcctgctctctggaacgccgctagctcctaccccttcccatgcttctgacaactcctctgtaaaaatgtcacatcctccgaggggcctcctcgatcacccagtgctaaacactctcctctctctctctttttttttttgagacggagtctcgctctgtcacccaggcaggagtgcagtggtgtgatctcggctcactgcaacctctgcttcctgggttcaagcaattctctgcctcagcctcccgagtagctgggattacaggcgcccgccaccacgcctggctaattttttttgtatttttagtagagacagggtttcaccatcttggccaggcaggtcttaaactcctgacctcgtgttccacccaccgcggcctcccaaagtgctggaatgacaggcgtgagccaccgcacccgggttctctcttacaaacggggtcttgctctatcactcagtctggagtgcagtggtgtgatcatagctcactgaaacctctgcctcctaggctcaagcgatcctcctgcctcagccccttaagcagctgggaccgcaggcccacaccgccacaccttgctaatatgtgcatcttttgtagagagggggtttcgccatgttgccc[131 bp omitted]tgcctgtcaccacgatttggaattgtctgtgtttaaatggcaatgttcagggtctcccgctagaaaaccagctcccaggggcaagggagatgccacggtcacttctgtgttcttgatgcccccggcccagtgcccgacactcatgactgctcagcaaacgttggctcagtgtgtgacccggtcacgtgcctggcacataagaagcatcagataggtgtttgtgatttctgtggctgtcactgcctgagcgggcattttgagtgtaggagaaatagcagtgcctggatggtagaagcccagaggtcttgtcctagcttggcttcttcctcctgataattgaatgacttaaaaaaaaaaaaaaggaaccatttcttttctttttttatttttttgagacagagtctcactctgttgcccaggctggagtgcagtggcgtgatctcggctcactgcaacctccacctcgtgggttcaagtgattctcctgcctcggcctcctgagtagctgggattacaggcgcccaccaccacacccatctaatttttgtatttttagtagagacagggttttgccatgttggccaggttggtctcgaacacctgacctcaggtgatctgcctgctgcagcctcccaaagtgctgggattataggcgtgagcctccgcgcccggccagggcagccatttctggacctcttgacatggtctcggcactgtcttaggtgctccacctcccacttccatgctttcctggtcacaggcctctgaggtcaaaactgagccatccccattgcccagaagtggtcactgaagcacagagggttgaagtcatttgccccaggtttaaccctgaagcccgcggcccgaccctagtgcccaccatacacgaatccatctcactctcctgccttcgttcttcggctcttctgggcctcggtttccccatttgtaaagccaggagacaacacgcctgacattcaggatcccgcatgtggttgccgtcctctgggtcatagtcctgatggggaaatccacccacgactggtggtgacgcgcgttctctgccccgactcccacagccagtgagctcctccgacagcgaggcccccgaggccaaccccgccgacggcagtgacgctgacgaggacgatgaggaccggggggtcatggccgtcacagcggtaaccgccacagctgccagcgacaggatggagagcgactcagactcagacaagagtagcgacaacagtggcctgaagaggaagacgcctgcgctaaaggtaggggaggaccaaggtgggctggcccttcatccccttgccctgatgtctcgcctggcagcttgctctcctgccctttttttttttttttttttgagacaaggtcttactctgtcgcccaggctggagtgcagtggcgtgatctcgactcgctgcaacctccgcctcccaggttcaagcaattcttctgcctcagcctccctagtagctgggattacaggcacctgccaccgcacttggctaatttttgtatttttgttagagacggggattcaccaggtccccaagttggtcttgaactcctgacctcaggtgatctgcctgcctcggtctctcaaagtgctgggattacagtcttgagccactgcgcctggccacctttctttttttttttttgagatggagttccctctgtcacccaggcgggagtgcagtggcacgatcttggctcactgcaccctctgccactgggttccagcaattatcctgcctgagcctccccagtagctgggattatgggcaccaccaccatatttttttttttttgagacggagtctcattctgttgccaggctggagtgcggtggcacgatctcagctcactgcaatctccacctcctgggttcaagtgattcccctgcttcagcctccgaagtagctgagattacaggcatccaccaccacgcccggctaatttttcgtattttagtagagacagggtttca[132 bp omitted]tatgcatttaaaaaaaattgagttatagtccatacaccatgagattcatccttcctgaatatacacctcagtggtttttagtgtgttcacggaattgtgcaaccattaccattattccaggagatttccgtcaccccaaaaagaaacctggtccccatcagctgatcctccgcatcccctcctctggcccctggcacccacacatccccttcctgcctctgtggaggggcctgtcctgggcatttcatagaaatggggtcacacactgcatagcctttgtgtccgccttccttcaccaagcgtgacgtcctcagggtgcatccgcactgcagcccgggtcagctccattcgtttcatttatttatttattttgagacggactctagttctgtcgcccaggctggagtgcaatggcatgatctctgctcactgcatcctccacctcccgggttcaagcaattcttttgcctcagcctcctgagtaactgggattacaggggcccgctaccacgtccggctaattttgtgtttttggtagagacggggtttctccatgttggccaggctggtctcgaactcctgacctcctgatcagcctgcctcggcctcccagagtgctgggatgacaggcgtgagccaccgcgcctggctgcctcccttccttttcctggccgggtcagattccggtgtgtggagggaacacggtgtgttgatccacatgtcgctggccatttgggttgtttccacttttgggccattccagatcaggctgccgtgaacgtttctgtacagagttttgtgcagatgtgtgtgttccattctcctgggtatattctctgtcctgccttttgaccatttctcactatttgggtgtagaaacaaaggaccagattctagcagcaaattcttttgatagagtcacgtgtactttgtattattttctgattctaaaatgataagccatatttatagtagataacttggaaaatgcaaagaacagagagaatttggaaaaaatacctgtagtatatgaggggtttctgagccaaggaaggattatttcttttttttctcttttttttttttggcgggtgggggatggagtttcactcttgtcacccaggctggagtgtgatggcgcaatctcggctcaccgcaacctctgcctcccaggttcaagcgattatcctgcctcggcctcctgtgtaggtgggattacaggcatacgccaccacacccagctaattttgtttttcagtagagatggggtttctccatgttggtcaggctggtctcaaactcccgacctcaggtgatctgctcgcctcagcctcccaaagtgctgggattacaggtgtgagccaccgtgcctggccaaaattagccatttttaagtgccccgttcagcagcattaagcacattcacgtggttgtgcaaccatcaccaccatcatctccagaactttctcgtcttcccaagctgaaatgctgtcccatgaaacactcactcccaccacccacccccccacccccccacccccccaccccccccggcgcagccctggtgcccctcatcctactttctgtctctgtgagtctgatggccctagggacctcctataagagtttgtctttttgtgactggcttctttcaccaagcataatgtcctcaaggttcaagatccctggtttgatcaggttctcagagggttcctggcccgccagagaggttccagagctcagctgtcgtgggtggtgggcagtcagctgggggcttcctgccaggagcccggccttcccatcactgagcattcaggccgttccccttccagatgtcggtctcgaaacgagcccgaaaggcctccagcgacctggatcaggccagcgtgtccccatccgaagaggagaactcggaaagctcatctgagtcggagaagaccagcgaccaggtgggccagtggctccttgggatggcagggaagcgtggtggctgccagtgggccccagttcagctcacttctctcccccaggacttcacacctgagaagaaagcagcggtccgggcgccacggaggggccctctggggggacggaaaaaaaaggtagcgtgcacttgactttgtttcccatgcccactcgtggggcacctctgcggtctccagtgctgtccccagggcagggcgggccatttctggagggggtgggacacggactgcagggtacccgaggggaccgcctctgccctgagcgtggcacctcgttatggccgcactgcctccaggagcccaccatctggtttggaaaggggcattctgggatgctggcatcagaagggagggaagcagtcctgacgcgcctgcatgagagtgagagagtgagaaagcaagagcgcgagagggacacagaagagaggagagaggtgtgtgccagtgtgtatatgagcggattgtgtgtgtgtgttctgtctctgtgcacgtgtgtcgacgtgcatgtgtgtgtgtgtacttgtgtgtatgcatgtttgtgaccatgtaggtgtgtatgtgtgcagtgtgtgtgtagattgtgcatgtgtgatgtgtgtgtcgtgtgtgcacatgtcgtgcctgtgtgtgtgtttctggtgcctgtgtccctgtgcctgtatgcctgtgtgtgtgtgtgctgtacctctcctctgcgtctatgtgttgtgcctctgtgttcctatgtgagtatatgtggtgcctgtgtgtgtgcctgtgtgtccatgtgtgcatactgttcatgtatctatgtgtctgtgtttgtgtgtctgtgtgtggtgtctgtgttgtgtgtgtttgtgtgtctggtgtgtccatgtgtatggtttgtggtatgtgtgttgtctgtgtgttatctgtgtatggtgtgtgttttgtttgtgtgtgttgtctgtgtggtgtgtgtgtctggtatgtgtgttgtctgtggtgtgtggtatgtgttgtctgtgtgtggtgtgtggtgtgtgtggtgtatgtgtgttgggtgtttgtgtgtctggtgtgtctgtgtctatggtgtgtctggtgtgtgtttctggtctgtgtgttatgtgtggtctgtgtgtgttatctgtgtggtgtgtgtgttgtctgtgtgtgtgtggtgtgtgtggtgtggtgtgtgttatctgtggtgtgtgtgtggtgtctgtgtggtgtgtatctgtgtgtgtggtgtgtgtgtgtggtgcgtgtgagttgtctgtggtgtgtggtgtctgtgtgtagtgtgtgtgtggttgtgtgtggtgcgtgtgtgttatctgtgtgtggtgtgtggtatctgtgtggtgtgtgtgttgtctgtgtgtggtgtgtgtgtgttatctgtgtggtgtgtggtgtgtgtgttgtctgtgtgtggtgtgtgtgttatctgtgtctgtgtggtgtgtgttgtctgtgtgtggtgtgtgcgtggtgtgtgtgttgtctgtgtctgtgcggtgtgtgtggtgtggtgtgtggtatctgtgtggtatgtgtgttgtctgtgtgtgtgtgtggtgtgtgtgttgtctgtgtgtggtgtgtgtgtggtgtgtgtgtggtgtctgtgtgtggcgtgtgtgtttggcagggtactcgggtggaggcggtagagcacggcagcttgtctgatgtggcctccgcacaagattttgcataaagaaaaagatgtccccactgggaaacccgggcttctgatgtacccggttcactgaggaagatgaggggaagggccagcagctgcccggcgtgcccagggccgcctgggatcccggttttcacttggggtggaggtgggttttgtgggtgggaggggattcggagccgggccctgagccgaggcccgcagagcctggcggctgcaggggtgcgggagcctcctctggcctggtgcgccccgcttctcacggtggggctcctgatgctcacgcctgtccctgcttctccccagaaggcgccatcagcctccgactccgactccaaggccgattcggacggggccaagcctgagccggtggccatggcgcggtcggcgtcctcctcctcctcttcctcctcctcctccgactccgatgtgtctgtgaagaagcctccgaggggcaggaagccaggtagggccctcgtgctcgcacatctcttggcctggcccctgccggggcgctcccaggcagtcccctggtcaccttggagccctggaagggaaggtcaccccctcctcctcttcctgtagcggagaagcctctcccgaagccgcgagggcggaaaccgaagcctgaacggcctccgtccagctccagcagtgacaggtgggtgctggggctggggtcccctctggcggctcctccatcggctgaggggcagggcgggctcctgagggaggaacggaggtccccaaccgccccctccgcctccagtgacagcgacgaggtggaccgcatcagtgagtggaagcggcgggacgaggcgcggaggcgcgagctggaggcccggcggcggcgagagcaggaggaggagctgcggcgcctgcgggagcaggagaaggaggagaaggagcggaggcgcgagcgggccgaccgcggggaggctgagcggggcagcggcggcagcagcggggacgagctcagggaggacgatgagcccgtcaagaagcggggacgcaagggccggggccggggtcccccgtcctcctctgactccgagcccgaggccgagctggagagagaggtgagccgggagggcgccgggagtccctgccttcactccacacgtttatggagcatctactaggtaggaggcagtatcccaggttccgggacccatcaagaaagcagtgcgtgggcccagaaactcctgccctggaggaggggacattcatgggagggagggggccgggcttggtggctcacgcctgttatcccagcactttgggcagctgaagtgggacgattacttgagtccagctcgagaccagcctgggcaagatagagagaccctgtctctataaaaaccttaaaaaattagctgggcgtggtggtgtgcgcctgtatagtcccggctgctcaggaggctgaggcaggaggattgcttgagcccaggagttggaggctgcagtgagctgtcatcaatccactgcactccagcctgggccacacagcaagaccctgtctcaaaacaaaacaaaggagggaggagctgtacagatgacatgagggtagtgcgtgctgtccggagttttcggtgctaaggagaagagtaaagtggggtggggggtttctcttttaaatagagtagaccctgaaggtgtgagtagactccaaaggcttgcgtttgggtttaagtaaaaggctccgaatgggctgggcgcagtggctcacgcctgtaatcccagcactctgggaggccaaggcgggtggatcacgaggtgaggagatcaagaccagcctggctaacacggtgaaaccctgtctctactaaaaatacaaaaaaattagccaggcgttgtggcaggtgcctgtagtcccagctactcaggaggctgaggcaggagaatggtgtgaacctgggaggcagaggttgcagcgagccaagattgtgccactgcactccagcctgggccagagcgagactccatctcaaaaaaaaaaaaaaaaaaaaaaaataggctccgaatgaagggaggggatctacgaagactcctgggaggggatacattctaggcaggagaagcagctcacacacaggcccagaggactgcgcctggcgtgctggaggaacagcgaggtggcctctggggctggagtggagggaggaggggagagagggaaaaggagggcggtggggaacggacagagcaggccgggtagggccatgtgggctgcagggaggatttgggctttgaccctgagggaggtgggagccatggagggcactggacagggtagggacaggccctcactcgggtgctctcgggtgccctctggctgccatggggtacagcttgcaggtgagcgtgggagcaggtaggaggcctcctagggtggtgactgtcaggactctcctataccacgtgtggtgctgcgggccctgtcacgccctctacccttgtggagattcaggcaatgtggcctgaatccagagtctcacctagactgagtgcctggggcccacgtgctggtgcccctcagccaggcctgccttctttggggaaagcacgaacagcgccgtgttctctctctgtcactcccttcatcacagaaagggcaccgaactcctggtgcaggaggcgtttcagccacagcccaggactgctgggcaggaggagtgaagggggctgttcctccactgaatggggcctgggctccaagaaccccacgatccactcaggaccggacactgggtcctccctcctctcccatcctgccccagcaccttcaaacagtgtggagggcgacagaaagggtcgagctgcatctcctggtagtgggatgggctaggggtctgggtaatcccctcttcccactgctccagcgcgcccttcctgactgctataggccaagaaatcagcgaagaagccgcagtcctcaagcacagagcccgccaggaaacctggccagaaggagaagagagtgcggcccgaggagaagcaacaagccaagtgagccctgctctgcccctccacaccctgggggccccgcaccccgcatcaccccacaaccctcacccctcacaggggcagccccacctctgagttcagccttggagccggacccggttgaagttcctggtccttgggttgtgtgggctgcgtaggaatcgctgctgcgggagtgggatctttgcccagcccaggggtctcctccagggcgatcccgcctccagagacacggccacgtccggggacatctgtggttgtcatgactggggggtgctcctggcatggagcgggtggaggctggggacgctgctgagggccctgtagtgcccaggatgacccatcccagagaacagtccatccccaatgtccacaagcagaggaggagggagaaactgcaccccggcctaggggtttgcatcttggtccccctgtggtgggcagacagagcctgtctcccagctcacttttttttttttttttgagatggagtcttgttcttgctcttttgcacaggctggagtgcaatggcgtgatctcagctcactgcaacctccgcctcccgggttcaagcgattctcctgcctcagccctcccgagtagctgggattacaggcacccgccaccacgcctggctaatttttgttgctttagtagacacggggtttcatcatgttggccaggctggtctcgatctcctgaccccgtgatctgcccgcctcagcctcccaaagtgctgggattacaagtgtgagccaccgtgcctggctgcagcccacgtttttgtttttgtttttgtttttttttgagacagagtcttgggcttgctctgtggcccaggctggagtgcagtggcgccatctcagctcactgcaacctctgcctcctgggttcaagcgattttcctagctcagcctccaaagtagctgggactacaggtgtgtgccaccacacccggctaattttttgtatttttagtagagacggg[147 bp omitted]cccatgagaattcggcaggccggtatggcagtggcggggtacagagcagcacatggcaccgagcctcagcaatgggcctctctcctgcacgcgtgtcacccttgagggccttttcctagctcgctgactctggtagacaaagccagcccttggccatgtgaacgaggaaaagaatcctgggatttcatgagaactcgggaaaaggcttgtatctttgggcagctcgagcctgtggctgccctggtctgccctaggcctaggctgtggcagggcctccccgcctcccgtttcccggcttagctcccagggcctcccaaaggtttcctttgcagtgggtttgggtccaccccttcaggcgccagcccctcagtggcagagtgccggtgacggggcccgactgaggggagcacttctccacaggcccgtgaaggtggagcggacccggaagcggtccgagggcttctcgatggacaggaaggtagagaagaagaaaggtgaggcctggctgcccagcactgcccacactgagttcactgaggggaacggggacagccgtggcgtggctggcctgtcccgcctgtccctagagagggtgctcagcacatcctcggccggcctggccggcggtgcctccaggggtgggggctgagcctgcagacctggggcccccatgacaaatcctccagaggctctcaggctcctgcccttgaacagctggccccctgtggccctgcctgggcccacacggtgctctctctcctggcccagagccctccgtggaggagaagctgcagaagctgcacagtgagatcaagtttgccctaaaggtcgacagcccggtaagaccctcagggcctgtgagccaagcagtccccgctgccacctccctgccaggctcccttagatgtctcgggaaactgaggcaaagccggggtcctgcagttgggtgggccaggagtctgttccggttgctagtgagcgcatggggtctcctggccaagggccctgggggagctggtcctgacatgcagcacccagctttcccggcaggtggtgtgtggaggcccccaggaccaacccccacgtacctgggaccccaagtatctggctatccctggagttccccgtcaactggacgggggctgaggggagctgttctgcagatacagctcccctcaaggagagcccaggatgtcttcctccacccatcggggccctgggacccctggggatcccttggccaggccgtctccctcactcccaccccaccctgcaggacgtgaagaggtgcctgaatgccctagaggagctgggaaccctgcaggtgacctctcagatcctccagaagaacacagacgtggtggccaccttgaagaaggtatggcgggggaatcagaggcgcagggtgcagtcgggggagctgggagcaagtgcctgcccgggagcccaggcccccagcaggttcctgtcgggacagccctgggtcag[137 bp omitted]tggtgaaaccccatctctactaaagatacaaaaattagccaggtgtggtggcgcacgcctgtaatcccagctactcaggaggctgaggcaggagaatcgcttgaagctgggaggcggaggttgcagtgagccgagatcgcgccactgcactctagcctgggtgacagggcgagactctgtctcaaaaaaaaaaaaagaaatgcctgctgcacagagctgtgctcccgggaggggctgcgggaggggcgcattgctggggcgaggggttcagagccggggctagggccgctgcacttgggtgagccaggcctcttctcttggtggccagattcgccgttacaaagcgaacaaggacgtaatggagaaggcagcagaagtctatacccggctcaagtcgcgggtcctcggcccaaagatcgaggcggtgcagaaagtgaacaaggctgggatggagaaggagaaggccgaggagaagctggccggggaggagctggccggggaggaggccccccaggagaaggcggaggacaagcccagcaccggtgaggggcgggtggggtgggccctgtacctcagtctcctcagctgaagaaacagatgctttgcagaacattccagaaggggagtacagctctactctctgccccaaacctgccagagtgtcatgtcctgttggggtctccgtgcagacccggctttaatccctggggcagccagtgaggggcattcaggtcctaccgtgtgccaggcagccagcatgcaggtaacttggggctcacgccagaggggtgacggggacagtgcatgacagcacacgcctccaccgtctcccaccctgggacgcccagagaggggggtggctctgtgcagcgggggcaaagagtgggggcattgttcagagaggcagtcggtggaggctcgggggcggaggcctcaggtgcccttgcttgcctggtgggccgacaggagatgaggtgtgaccctcggggctgctggctgtggggctactgggctgacatggccccattacaggtgctcagagcagccctttggagatgggatgggcgagcttgggatggggctttgcggcccagggggcagccgaaggctagtgtcttttttttcttttttcttttttttctgagatggggtctcgctctgtcccccaggctggagtgcagtggtacaatcacagctcactgcaaccttgacttcctgggcgcaagccatcctccacctcagcctcctgaggagctgggattgtaggcctacaccactatgccctgctaattttttttttttttttttttttttttgagacggagtcttgctctgtcccccaggctggagtgcagtagcgtgatcttggctcactgcaagctccgcctcctgggttcacgccattctcctgcctcagcctcccgaggagctgggactacaggcacccaacaccacaccaggctaatattttgtattttttagtagagatggggttt[141 bp omitted]tgctggcatgttactcaggctggtcttgaactcctgggctcaagtgagcctcacgtctcggcctcccacgtgctgggattgtgagcccccgtgcccgaccttgtcttcctttgtctttcccaggctgctgtgggcttttctcagggctgcccacgttccctcatttcttgggcccccagttctgcaggccagtgtggctcgggctggggctggctgcagcatcccatgtcaggagcttgcagactggacagcaggtgctggggtccaggtggatgggcatgtgtcacccacggcgctcagcttggcccctggtccagtccttgacaggcaagggttctggggtgcccagctggagcccagcagtgtcctgtgacccctctgtcccacccagatctctcagccccagtgaatggcgaggccacatcacagaagggggagagcgcagaggacaaggagcacgaggagggtcgggactcggaggaggggccaaggtgtggctcctctgaagacctgcacgagtgagtgtcccgggccgtggggtttggactcctgagcggcagcggtgtgacgcgcaccctgggtccgagccgctcctcctgtgccagtccctctgggatgggtcccagggatgtcgtccttactcgggcctcccaccttcacagctgaccccagggccccgctggctggcacttccggcggcccctacagagaggcagctccagggctttgagctgcctgcccctggcctcctgggaaggtggcttcttgccgagcctccagggtggcccaggtaggtaggccccgagcacgggcacccggctatctgacggtgcctgtgcccatcactgtgggctgctgtctggtacaaggctcagtggagtcactcacttacccagcagctgccttgtgctatgcctggctggcgccagcgtggggaccctggagatggttgtggtctctagtggcagaagacaggcagataggagggcggcactcgagcctcaggtgccacaacgggggtacactcctcggtgcccatcccacccaaccgccctacaggcagggcaggggcgggagggcatcctcacaccgcctttgctgttcccaccagcagcgtacgggagggtcccgacctggacaggcctgggagcgaccggcaggagcgcgagagggcacggggggactcggaggccctggacgaggagagctgagccgcgggcagccaggcccagcccccgcccgagctcaggctgcccctctccttccccggctcgcaggagagcagagcagagaactgtggggaacgctgtgctgtttgtatttgttcccttgggtttttttttcctgcctaatttctgtgatttccaaccaacatgaaatgactataaatggttttttaatgaaaaaagaaatcacttttattggcttggttttctagcattgctggtgcagtgggggcctgagctggggcgcaggcggcagtgtcactgggcccgtttgggactgggttgagccatcaggccaccgtgagaagcgactaaaaggcactctgggcccagcccaaccctgaaaggccagtggcaggagagctgggcgggagcaagctcttcccaggagacaagagggacaaaccagggcatctaagctgtgctgcctgcgccctgccccgcacccacgaggctggggggtttgatgcttcctgcatctggcagcccagggtccaggcaggtgagcaggtccgatgtggggaggacgagggtccgcgaggctaggctgggagggtggagaccaggccttccctgagagccgctgctagccgacagtggtctccagcgttcagggagcatgggcctcaggggccagcctcgactcaccccagctgtgtcacccacacaccgtgtgactttggacaggttcccctcccactcggggcttctctttcctcctctgcataaggggctgtcacgtgggcacggtcccaagcaagtcaccccgtgctccgaagttgctcattccacagtggcgtctcgtgtttgtcgtcctgcccagcgtagccgagttgcctccgtcccagtaagaattaggctgtggtgtggcgggaagggacttcctgagctgcggccccatgcttggttggctggacgtgagctgcagtcactgtgcctgatttctgcaaatggctgtgtctggcatcctagcctccgatggccatgggtgtcgggctgaggagaaggcttgggaaggctcctgacccgtcccctctcacggcccgtcacctgaggcagtccttgccgtgccagcttccccggttcagagctgagctgaatgccccggcccctcacggcccctggtgcacacggtgacccctggggcccctccacccttcctccccctgggtctggggttcctgggctcgtgtcctaggagagcatggaaaggggacgacaaggttctcttaccgggtgagtggggatatggcttcctggggaggccgggctgaacggctcctccccgctggactgagcgcagccacggcacgtctcacacccgacctgagcctgccagcctccacgacctgggctagcctgagagcacggggcccggcggccgggtccgccaccaccagtgtctctgatgcctgcagcctccccagccccgcttcctctgcagcccggcgcttgggtgggcctgaggacccagggggagtgtgcggcggaggaagggctgtgccataggcacgcagcctctgtggctgttcccagccctgtctgatccctccatagggcacagttccctgcggggaagtcctttgtctgtgttctccaggggcagctgctgggcccagcctccccaggggcctcagagccccaggtgcctggggcaggcctgtggtgggcagctggaggcagcagcagcctgtttgcttgttttttgcaccccccaccccctgcaaactgctcagtctcaagccaggctggtgcaaagccccagctgtggctgctgtggctcctggcagctttgtccccaccgtgaggccaccccgggggtcagcaaaggcagtagcagcctgccttgggatgatgatggcagtgtcgctttttctagtactttctactatgagggaatgtggttcttaagaccctcaaggtgtgtgtgctaaggccggagacccactttcagcatgagaacggagctgcccggagcctgggatgccacagcactgcctgcaccgctgatagctgggggcccgtgctgcaggactggaagagccctgctagatataaaagggttgctagcggggcaaacagatgcccttccaggctgggcacgctgctttttctctttcctaattgcagtgcttgcttggggacttcaagggaaggctcttggctggtggtctgagtgaccccaggctccgagaggggcaggcagcgctggggaggaggtgggagatgcaggcaggcccggagcagggcgtggggtggctcagttaagaaggtcactgcctccgcagcccctcggcgctcagccagctgcagccccaaaggtctagggctttagggaaccgatccaggtttgggggcggggagaaagttctgaggcagctcctccctggacagagcagggcgaccccgcgccgggcctgcaggctcctacagctactgcccgccagcgggcaaggcgaagggccctaccagccagctgagcgggggattgtgctgtaggccctccagcagctgctctaacccctgccaagcctggtgcacaccctcgcggctctgcaccagccgctctgcgggcagctcctctacagagccagctgaggccacgatgccatagagctcacagaggctgtgccgcgcccgccccactggctgctggagctcggcgggcaggccctggaggctggagaccaggccactgtaggccgtgtgcagctgccggagaaggccgcagaccctggacagaaccccggcatcccgctcctgtgggaggaaggcgcaaggtgagtggagacccatgggcggggtggggggaccctagccctgtgccagacccacctcctggacagcagcgtcctccgcactggcacctgagccctggtccagacgtggctgcccttctggagcctgctgggccttttcaatctggagagagagtacagtggggaaatgatggcttcttggcaaatgacctttcacaacccccacctccccctcccccagggacctgggcacattcacagtcctgggagaaaggccacgagttccaagtcagttgtaccacagtgggcgtgttgtcttgcagaaagaggcaatagttcaaacttccccatgaggtcatcagggagtgcacgtaacacagtgtctgtggggtcgtgtcactcctcacccctaaacctgtggctgcccagtacccttaagataaaacccagctcctcaccatggccttggtgggctggcccctgggacacctctggcctcatctcccatggcaccccactgctgtctccactgaggccacactggctccattctgccctccggccactccagcaggcttctgccccagggcctttgcacacactgcccactcagccgggagcctgcttcccgggcccttcacaaggtccgcgttcggcctcagctccaggtgacccttggtgagaccttcctggcccatggtgtggcagccccagtccctcccgtcacatctgcccctctcctcgggagcacagcgtgcggctttggtgttcattgacttggtgtttatccgcccctggcaggggaacactcaggactctgtcctcgttgttgctgtgtccccagcacgtggcacccacgccccaccctgtccacagggccccatcttcctcatcatctcaatggctggtagggatgcggcacgccgtcaaaatatcgactccagactgctgtcgccctcccagccctcgccgcgccagtgctggagacctgaagccagctgcatatgcagacgcgtcccctcggtgcccaccaggcatctcccctcaccctgtccaaggccaggctcctaatatccactctgcaacccgcccggcctcccctcagcccccctgctctccttgtctgctcaggttacaagcctcaggggtctcttggggtcttctctcacctcccacatcggacccgggcagctctgacttcgaaacacccagagcccagctacttctcaccaccacagcgtgactcctgaggcccggcagcacttgcctgggtttacgtcccactgtctcctctggccctcgcccccacccggtggcctgacctcccccatcagagtgatccttttaaatgaaacccaccttggatcaggccgctcctctgcccagagccctccagggctcccaactcccttggggtcgaagcccaggtccggcccaacctgccccatcccctcctcactcggctccagcctcccaggcctccttcctattcctccaacatgccgggacagtcctgccccagggcctttgcacgggccgtgccctccgctcagatcacactcctgcccattctgacgcactccctctctgtcatttagacctgacttcaagtgtcccctcttcagggtgaccagccccagcacagccacttccttatcctggtacatgttccattttccaagcatcatccaacgcgacgccctatatattcatctgtgaattgtcttccccaaccatggcgccccccaccccccaagggcaggcctggatatccagggtcttcagtagcacttaaaggaacaagtgagacatgatgagtcacacaccacatcccatttcccagcccagcatccttcacgtgtggccctgagcaaagctcttctcttcctgtggcctccttctccccttctgaagagtgcctgggctgagttctggcccaggctactttgctgtgaggattcaaaggtgggaaaatgctttgtgatcagccgcttgcagcgtgctgcgagggtgggcccattccttcattcctccatggcgtttacaggaacgccttccaactgcgccattgtaccgcgtgccagaggcacggcagcgactgtgcatctgggggtggccacagtgacatgaggtgtcctgagggtccctaggacagacttgcccttggcactgtggacacgggggctagatggttctctggggtggggccaccctgggcactgcagggtgctgagcagtgtccctactctccaccaggggcttcccccagttgtgacaaccacagatgtccccagacatggactagtgtcccctggaggcaggtcatccacactgagaaccctgggttagaccctcaaactgcggcttgtcacaaaccccggatgttgatggaaaacacagtggcctaggctgcacgccaggaatcctgaccgagggcggcatctcaaggtttctcacggcccgccggggtgggactgctgtccaccaacatgtaaaacctgtgactgctgggcacggtggctcacgcctgtcatcccagcactttgggaggccaaggcaagaggatcgcgggagcgcagaagctcaagaccagcctgggctacatagggaggccccatctctacaaaaaatttaaccaggtttggtagtgtgcacccagaggctgaggcaggaggatcacttgaacccaggagtttaagaccagcctgggcaacatagcaaaatctaatctctactaaaaatacaacaacaaatactaagctgggcgtggtggtgcatgccagttgtccagctgcttgggaggctgaggtgggaggatctcttgaccccagtaggttgaagctgcagtgggccatgatcaagccactgtagtccagcctgggtggcagagcaagaccctgtctcactgtctccaaaacataaacccctagagcagtcctgtgagatttctgcctcccgggctgcacaacagcttctagaggaaatgttggccctcaggactggggacggggagactggaggccagggacgctgctcagctccctgcagggaccaggatgatcccaccccagagcacgatccggccccaacgtccacattgccaaaggggagaacctaggccagaggaagagagcggggccagtgggaggggtggacgactctggccagggtgcatgacccctggatgcatccgagtcatgttgcgttgggtcctttcctgcgtgcgttgcagccccaggccctgcgggctccctggatcccatcctggcttcactttacccagccacagcgccgcctttccattccccgaacacacccagcttgctccccggtagcttgctgtcctgtccctgcttttgggggctttgcagagctgtctccccatcggtcaggacagggcccagagggacggccttcctgcccagcccacatccccctctgcacacagattgttttgctgtctttgtgtccccaccgtctttatttttttgagacagagtcttgctctgtcgcccaggctggagtgcagtggcaccatcttggctcactgcaacctccgcctcccgggttcaacctcgcctcccagattctcctgcctcagcctcccaagtagctgggattacaggcgcctgccaccactcccagccaatttttgtatttttagtagagacggggtttctctgtgttggtcaggctggtctcgaactcctgacctcaagtgacccacccgcctcggcctcccaaattgctggggttacaggcgtgagccaccgcacccagcctacccgctgtctttaaggatctgatctagctccgtcccccttgccaggaggcaagccccatgagtacagagccatgaccattggtgacgctgacagcatcatctcctaggtgctcagtcagtatctgcagctgggtgagtcctgggcaggggttctaagaagtgccctggggacggggcagcagcagggggaagctcttaccagcctgaagcagtcctggagctgggccagagtgtccctggcttggaactggccgtgctgcaggtggctcaccgcgtgttcaaatgcccgctggcggaagctgggacccaggtcacctaaacgaacgaagtagctcccctgttccgccgacagcacctttggcccaggctgggaggcagccagctgagctggaaaggaaggcgcaccgctcagtcccggaagcccctcagggcatcagggctttataaaagtcaagtgagggccgggc[137 bp omitted]tggtggcgggtgcctgtagtcccagctactcgggaggctgaggcaggagaatggcgtgaacccgggaggcggagcttgcagtgagccgagatggagccactgcactccagcctgggtaagagtgcgagactccgtctcaaaaaaaaaaaaaaagttaagtgaggccaggcgcggtggctcacgcccgtaatcacagcacattgggaggccaaggcgggtggatcacctgggatcaggagctcgagaccagcctggccaacatggtgaaaccttatctctactaaaaatataaaataataataattagccgggtgtggtggcgggcgcctataatcgcagctactcgggaggctgagcaggagaattgcttgaacccaggaagtgtggaggttgcagtgtgctgacactgccactggactccagcctgggcgacaagagtgagactctgcctcaaaaataaataagtaaaaataaaagtcaaatgaagctgggtatggtggctcatgcctgtaatcccagcactttgggaggctgaggctggaggatcacttgaacccaggagtttgagaccagcctgggcaacatagagagacaaaaaacatacaaaaaaatacatagccgggcatggtggtcctagctacttgaggctggagcaggaggatcacttgagcccgagagattgaggctgtagtgaacgcaccactgcactccagtgtgggtgacagagcaagaccttgtctctaaaaaaatgaaaaagggccaggtgctctcacgtgtaatcccaacactttgggaggctgaggcaggaggatcgtttgagcccacaagcttgagaccagcctgggcaacacagggagacccccatctgaaacaaaccaaataaatacatttttaaaaaaaaagtcaagggcccagctgggcgtggtggctcacgcctgcaatctcagcacttgggaagctgaggcgggcggatcacgaggtcaagagatcgagaccatcctggctaacacggtgaaaccctgtctctactaaaaatacaaaaaattagccgggtgtggtggtgggcgcctgtagtcccagctgtttgggaggctgaggcaggaggatggcgtgaacccgggaggcggagcttgcagtgaaccgagatcacgccactgcactccagcctgggcaacagagcacgactctgtctcaaaaaaaaaaacaaaacagtcaaggacctgctagcagctgtgcctgcctcagggacccatgaacccaggcgtcccctcaccttgctcctccgcattcatggggtggaagatgtcccccagcccctccaactcattctgcagcattgccaagcgtggggcttcttcggggccgtgtgtggtggccaaaagccccgtgtcctccctgcctggggcggccccttgggtgaacgtcgccacgtcagtcgcaaggcccttggtagtggctgcggcttcccaggcaggctccgggcctacactgagcacatccgggggcgtggagatgccagagaacggggcctcttgggggctcagggcagtctgctccccaccattgtctgtggtcctggaactggtgagtccaccccaggaggtggcgggggtactaggtaaccagttctggaaggtgctgaggccagtgtgggtggcccctgtcgccacgttccctgaccccatgagcccagcggacactgcgtctttggttccggtcagcactgtcttggtggtgtccaggcccccctggacggcccctttggccatgctcatggcaccggtaaccccactgaagacagtgtccttggtacccataagcacagccttggaggcgtccacgccggtctgcacggttcctttggccacattcactgcccccgtgactccagtagtcactgcatccttagcgccactcagcaccgtcttggctgtgtccacacctgtctggacggtccctttggccacatttacggcaccagtgactccactgcagacggtgtccttggtaccggtcaggacagtcttgctggtgtccacgccggtctggacagtccctttggccaagttcacagcccctgtgagcccagtggacacggcatctttagtgccagtcaggacagactttgtagtgtccaggcccccctggacggcccctttggccactttcgcagcaccggtcaccccactgccaagggtgttctttgtacctgttgcgatattttgggtcgttttcagcccagtttgcacagcacccttggccacgttcgcagcaccggtgaccccactgcagacagtgtccttggtaccggtcagcacggtcttggccgtgtctacacccatctggacggcccccttggccacattcgcagcaccggtcaccccactgcacacagcatccttggtaccagttaacacagtcttggtggtgtccatgccggtctggacagtccctttggccaacttcacagcccctgtgagcccagtggacacagcatctttagtgccagtcaggacagactttgtagtgtccaggcccccttggatggcccctttggccacattcgcagcaccggtcaccccactgcagacggtgtccttggtaccagttaggacagtcttggtggtgtccacactggtctggacagtccctttggcgacattcactgcccccatgagcccagtagtgactgtgtccttggtgccggtcagcacggtcttggccgtgtctacacctgtctgggcagcccctttggccacattcacagcactggtcaccccactgccaaaggtgttctttgtacctgtcgcgatattttgggtcgttttcagcccagtttgcacagcccccttggccacgttcacggcactggtgaccccactgtagatggtgtccttggtaccggttaggacagttttggtggtgtccatgcctgtctggacggtccctttggcgacattcactgcccccacgagcccagtagtcactgtgtccttggtgccggtcagcacggtcttggctgtgtctacacctgtctggacagcccccttggccacattcgctgcccccgtgagcccagtggacatcgtgtcttttgtacctatgaccacagacttggtggtgtccaggcccccctggacggcccctttggccacgttcacagcactggtcaccccactgcagacggtgtccttggtgccggttaggacagtcttggtggtgtctacgccggtctggacggtccctttggccacgttcacagcccctgtgagcccagtggacacagcatctttagtgccagtcaggacagactttgtagtgtccaggccgccctggacggcccctttggccacattcgcagcaccggtgaccccactgcagacagtgtccttggtaccagttagaacgatcttggtggtgtccacgcctgtctggatggttcctctggccaaattcatggcaccagtcaccccactgcagacggtgtcctttgtacctgttgcgatattttgggttgtgttcagcccagtttgcatggcccccttggccacattcgctgcccctgtgagcccagtggacatcgtgtctttcgtacccatgaccatagacttggtggtatccaggcccccctggatggcctctttggccaagttcacggcaccggtcaccccactgcagacagtgttcttggtgccagttaggacagtcttggtggtgtccacgccggtctggatggttcctttggccacattcatggcaccagtcaccccactacagacggtgtccttggtacctgttaggacagtcttactggtgtccacgccggtctggatggttcctttggccacattcatggcaccagtcaccccactacagacggtgtccttggtacctgttaggacagtcttactggtgtccacgccggtctggatggttcctttggccacattcatggcaccagtcaccccactacagacggtgtccttggtacctgttaggacagtcttactggtgtccacaccggtctgaatgcttcctctggccacattcactgcccctgtgagcccagtggacacagcatctttggtgccggtcagcacagccttggaggtttccacgccagtctggacagtccctttggccaagttcactgcccccatgaccccagtagtcactgtgtctttggtgccggtcagcacagtcttggtggtgtccacaccggcctgtacggtccctttggccacattcactgcccccgtgagcccagtggacaccgtgtccttggtgccggtgaggacagccttcgaggtgtccagacccccttggacggcccccttagccatgtccatggcccctgtgaccccgctggacaccacctccttggtgcccgtaagtgcagaccgagtggtgtccaggcctccctggaccactcccttagccacgtccaccacgctggccaccccggaggacacggcatccttggccctggacatcttggaacacaccaggtctttggccccggacaccatctgctgagaaaggacacaggtggatcaagagaaggactgagaggtgtactccaccccgatgtctgccagcccagccccctagtgtgctttggggcaaggaactgcaggcacccagaggccccacctcctcaaaaagcaagctgcttcctcctcaccccgaccccggtcagccagacattcatcgggctgtggtgtggcaccctggctctccgggatgaagtcctcatgagctcacagcgccagcctcttccattctcacgcaccccctttcccggctgcaggcaggcctcgtccatgacagcatgtcctaggcttggactcagccagggtccccaggcctggactcaacgcaggtcctacagttacatttctgttcctcttgcttattctccattcatggcaaatgttgagcctggcgtcccagggacaccagggagactaaattgcttattaaaatcattatatccaggctgggtgtgatggctgatgcctgcaatcctagcatgttgggaggccaaggtgggaggatcacttgagcccaggagtttaagatcaacctgggcaaccaaacaagacccagtctctacaaaattttaacaactggctgggcggggggcacacctgtagtcccagctatttgggaggctgaggtgggaggattgcttgagcccaggaggttgaggcaatagtgagatatgatcgtaccactg[177 bp omitted]tggtggtgggcgcctgtagtcccagctactcgggaggctgaggcaggagaatggcatgaacccgggaaggcggagcttgcagtgagccgagatcgcgccactgcactccagcctgggtgaaagagcgaaactctgtctcaaataataatgataatgataataataataatatattcaggctgggcacagtggctcatgcctataatcccagcactatgggtggctaaggcaggaggattgcttgagcccacgagtttaagagca[144 bp omitted]gaaaccctgtctctactaaaaatacaaaaattagccaggcatggtggcaggcacctgtaatcccagctactctggaggctgaggcaggagaatcgcttgaacccaggaggcagagattgcagtgagccgagatcgtgccattgccctccagcctgggtgacagagcgagactgtctcaaaagataaaaaaaaattaaaaaacacaaaaatgaatgaagatgatgatggcctaggagttctaactctcgggtgtacctgtgaggtgctactttttttgtttgtttgttttttgaaacagagtctcactctgtcacccagactggagtgcagtggcgagatctcggctcactgcagtctccgcctcctgggttcagtaatttttctgcctcagcctcctgagtagctggtattacaggcgtgcaccaccatgcccagctaatttttgtatttttagtagagatgaggtttcaccatgttggccaggctggtctcaaactcctgagctcaactgatctgcctgcctcagcctcccaaagtgttgggattacaggtgtgaaccaccgtgcccggccaaggtgctattttaattcagtagttttcaactgggtgattctgcccccagggggcactgggtgatgtctggagacatctgtagttgtcacaacttggggaggctcctggcatggagtaggtggagaccagggatgctgctcggcaccctgcagtgcccaggatggccccaccccagagaatgatccaaccccaaatatccacagtactgaggttgagaagcccggaaattgtattctcagaacacatctcccagctttggctcaggtgggcaccttgggccctgtagttggagagacccaggttcaagtcccagctttttaccctctcctgctcccgacactcgctgtgtggccttaggcaagccacatgccctctctgagctaatatcctcatctggaaaatgctgattaaaacagatcctcttgccaggcgcagtggctaatgcctgtaatcccagcactttgggaggctgaggtgggtggatcacttgaggtcaggagttggagaccagcctggtgaaaccaacatggtgaaaccccgtatctactaaaaatacaaaaattagctgggcatggcggtgagcacttgtagtcccagctactcaggaggttgaggcaggagaatcgcttgaacctgggaggcagaggttgcagtgaactgagattgtgccactgcactccagcctgggtgaaacagcaaaactgcatctcaaaaaataaaagtagaagaaataaagtgcttacgctgctgtcgctttggtctcatcttgccaggcacagccctgtgtagactggaaccttacgtgattagagtggggtagcactgcacccatttcacagatgtggaaatagaggctcagaggggaagctccgcctgggatccccaggctgtctgccttccctcaggcccacagcagccccccagatagcaggaactgaaatgtcccaggagggagcagccccccagatagcaggaactgaaatgtcgcaggagggggcacccccagggctcctgccacatcagaccctgccctgcacatcctctcaccttttccgaaggttgcagctccttctccgtccatggggccgtctgctctgggtgggcagccactgtggggacaggggccggtcagggagagtgagggatgcagttagaaccatctacccggctgcccattgcacaatagccaggcacagcctaaaaggtcaggaatgtttcagctaccccgccagggacagcaggaggtgacatccacggctaccagccagacctggtcaccccccaaccccgctgggggctccccccaagcccagggccgctgttccctgaagtagggctctgtggaacttcctctgctgggtggacacccaccctgagtcccggggttcatatagcctggcatgggggaacagccccttgcccagcccgccccgcccccaccgcagctgcctgctgcctattgccaggccaaggcatgtggagcagaagtcagctgcctggggctctgggcccagagggaggcccagctcaggcggctgccccaaccctgggttccctgtcaccgtccctgatcgcccaagctgagccacaggaggctggggagcccctgggctgtgtgaccccaggggagctgttgctcctccctgggagtctggatctcactctgatgagctcagatgggcagagcacccagcctgggccatggtgcatcagaaacggagtgcagggtgggggaacggccgagggactgagtgggggggcattgcagggagacaggctgggttgaaagccaccttcggccactcaccccccatatttatgcctcagtttccccatccaccacaagatgtcctagtgtctgatgagagcacacagacaaatatggaggactccccaaatggctggaagtccctgcccggggagctccttctcccaggtccatgtgtagagtccccccacgcccccagctgggccagccactcaccctgagcctgtggttgggcagcctcggcagcaggcgctcctgtggggtcagcggccggccgggctctcgccgagctatgtgcgttggccaccaggttccgggcagagctgaagccaggcagggacccaaagaagctgcccagggtctgcatgggggcggggggtgtgcaggatgagcaggccaagcctcggcaggaacgggtcagaggaagcatcgattgatcagcccaatgccgccccggccccttgctcctgggtgacctcaggaaagtgtttcagccactcagcctcaatttccacacctgggcaatgggcagactcagcctgcctcccatgcacagaggaaaagatcgtctacccgatctccaaagaccttttccttccaggatccccactgcacagatggggaaactgaggctcagagaggggcggagctgaggccggcccaaggtcacttgctggggaaggtgtcgaggtctgcgtgggtcccccgcctccagcttgggtcagaaaggaagggattggcatcatggctcccagaccgcccccaccagcccaccagggaagcacctctccagattcgagaccccaggactgtggaggtcaccttccccggctctggggcatctccaggccccagcaagaatctgccccatttcccctctttaccttgcccttcggtttggggggatcccgtctcccttcgtctggagcagacatagtgagaacgtgagaagctggaagggggcagagaaggtgcgtgaatgggggttccctagcctcccatcccacacccactccccactgaaagcctgagcagcccgacacccacctgcaggcctggcctcaccctggtgtcaccgaagcagacgcggccccgctcacctggactgcgcggggtcccctggaggacggaccggcccggctggcagctggctctaccctcagctccctggccttatagggtccggggcaggcgcaggcccagccagcagcggcaggcggccaatgggcccgggggaggtggcctggacggtcacatggctacctgcccagcccagcatgggcccaggcccagcacctttcccctgtttcctgcccacagcttgcatcaggctgagtggctcacaggccagatgggctcccctcccgggcccctgagcctccagttccatccacgaggtgggtgtagttcaaatctctgctgcaccaggatgccttggccagttaccatctttttgcttcaggtttctctctcgtactccgcaccacgtcccgtaacatccagcttcttctctgctctcatctcccccagcttcctccttcgcttgcttcatcccagccacacaggcctcctcgctatgcctccagcgcacctggcacggtcctgccttagggcctctgcacgggctgtgccctctgcctggaacaccttccctgcaggttcccacagggcaccctcttccgcccacagaacagtgcctggcatacatttggcgcttaatacacgtttggctcaatggagcaacacagagagtggttgtgagcctctgtgagatgaggtcatgcactgaacaaatgctgccttcgcgttacccaggcagaagcggggtctcggggtctcggcaaggagcagggggtgtcctcagtgtggaggggagcccatcactctccggaagggacttgggccaaaacgcagaccaagatggagcaccagccaagctgggggcaccctaggagtggaaacccagcctggggggcttgggccaacccagggaggctccctggaggaggcgtcctgttccagaagtggtgaggatgggattcaaacccagaccctcctgttccaggaagtggtgaggacgggattcaaacccagacccaggaccttcgtgctgagcccagcctatgtgctgggctgtctgtgggtgggtgggcagaggaatggccgtaacgcccaccctgggctgtgtccccctcctacctgcccctgagacagggttcctagccctgtgttattgggggtgagagggcagaccccatgggtggctctgggcactgggctgggaggagggagggtacagccacaggatctgatgattcccaggccgtctgtctccttggagccgacactgtgtttgccaaacagtgggggaacagaagggggggtgtcccccaacctcttctaccagccagtgcttcccaagggtggctgggagagctctgggtgcccctccccttcccaaagggcagccacagcccagtgtgtggagagaaaaaattaaaaagtgatcataaacatcccagccaggatctacccctcctctgcccagcaccctccatggctcccaccttctccggggtgggagcccagggtcaaagcccaagtccccttcctgcagcccggtaggccctgcataacctgcctcgtctgctccccaccttcctctccttcttctcttcactctgctccagccacacgggccttttcactgttcccataacatgccaggacagagtccctcaaagacacacgtgactgtgcctgcttagccccgcacacccttcctcagggctttcgtgtgggttgttgcttttgcctccagcaccctttcccacatccctcacctccttccaggtctttcctcaaatatcacttcctcaaagaggcattcctggatctcctctccctttaaaaaatatatacctcaggccaggtgccatggctcaccctgtaaccccagcatttagggagaccgaggcaggaggattggcttgagcacaggagtttgagaccagcctgggcgacagagcgccaccccgcctcaaaagaacaaaagaaaaaaaaaaaaaaataaataaaaaaaatatattttatatatatatatttctgttg[131 bp omitted]ccaccacac[136 bp omitted]ggctgcccaaaatatatctttaaataaaaattaaatgaattaatgggccaggcgcggtgactcatgcctgtaatcccagcatcttgggaggccgaggcaggtggatcacctgaggtcagggttcgagaccagcctggccaacatggcaaaaccctatctctactaaaaatacaaaaatcagctgtgtgtggtggcgcacgcctgtaatcccagctactcgggaggctgaggcaggagaatcacttgaacctgggaggtggaggttgcagtgagccaagatcgcgccactgcactccagcctgggtgacagagtgagactccttccccacccccccaaagaaaagaaaagaaaagaaaaatcccagggcttagctcaacccattctcttttcctcacctctgctgcagtgaaactgatttccctactgctgtgcctttccctaagctgttccctctgccaaaatgcctacccctatgtgctgttctgatcatcctcaacaggcctggccctgccaggagcccccagcctcatgtgggaagagagagcaaggctgcctgtggctataaagtcaaggtggaaagggcaagaaaccttgagaaggtggcctgtggaggaccggaggagggaagtatccggctgggatggagtcctggaagccttcctggaggaggaggcattgaggctgggccttgaggatgtatgagatgtgtccgagggacggatggggggtgggaagagtattccaaggtggccgcacagcctcagcaaaggcccggaggtgggaatgtgcccacttcaatggtaagagagcaaagtatccaggtcaggctggaggaggaagctggaaggtgaagagtttggtctgtgggcagtggggacctgtgggagattccagaacaggagcagggaggtagatttggctggtggaagtggtcggagatcccagagctgccctctggactatgtcccagggaagtcaggggccaccctgacctcaccataccaagctgtggtttcccaacaccccgcccagccccaggggagtcggaagagcagccaggaatgcggtcagaggacaggaggaaacccccgagaccagcctatggcccttgccctgcctctgtcttcccatcctggccagtgcagctggagagaccacagcaagaccagctcctgcaggaccaggaggtagagagagagctgccccatctgactccttccccatcttttctgctccctgcaattccatgaaattcacctgtaccaagatgagaacagcttccatgcggccaaaggggcaatgctgttgtttatttttagagacagggtctcactctgttgcccaggctggagtggagtggttactgatccaagctcactgcaacctcaacttcctaggctcaagcgatcctgctgcctcagcctcccgagtagctggggcacaggctcgtaccatgtgtcattttaaaatttttcgtagagacaaggtctcctatgttgcccaggctggtgtcaaaactcccgggctcatgaaatcctcccacctcagcctcccaaagtgctgggattaccgatatgagccatggtgcccggctaattttaagtggtaatgcttaccccacatgggctgggcagtaacggtggatcccagacaggatgacaggcaggtcagagaagcaccattcttctagatcttgaactctggctctacacacccccttctccatgtctcagcagtgacacacctccgtggcccccagccccctgggactgagactcaccctggctggaacacacacgtgggcctttcaacaacaaaaaggacctttattctggaggcaaatcccaaacagcaaagcaagcgagtatggcaggctgagcagcacggcccatgggcagaggagggctcacttttcaaagttccaaatagggcaaaatgtgtgtttccctaggaagtattttttaaaaacatttttgagatagagtcttgctctgtcacccaggcgagagcgcaggggcaagatcatggctcactgcagcctccaactcctgggctcaagcagtcctcccaccttggcctcccaaagtgctgtgataacaggtgtcaaccaccacacccagtcagggctcacttttcaaagccccaaacagaaggcattgggcaaaatgtgtatttcttcgggaggctgttactattattttttgttagatggagtctcgctctgtcacccaggctggtgtgcagtggcgcgatctctgctcactgcaagctccgcgcctctcgggtttaagcaattcttctgcgtcagcctcacaactagctgggactacaggtgcacaccaccacacctggctttttttttttttttctttctttctaagtagagacagggtttcatcatgtt[134 bp omitted]caggacataggtgaagaacccagcttgtggctcaagttggcctgaatagggttcgaggccctgctcccccgggcctctttgtccatgtgttcaaggaaaaaatgggagagtccaataccaaaaaggtggtcagagatccggagttgggcctgattccaaagaagggtcaaggccaaggcctcgagcttacgtgtggccaccagggggcagcagggatcggggtgtgcaggtggcctttcctccccgcctccactggcccatgggtcagaagtccagctcgggcatcagggtgtgcttgaccgggcagctgggggtctcgggttcctgctcgcagatgtccccggcaacacccatcctgtccccatccccattcccactcccgtccctgtgctctgcctcccaggctctctgctgggccggccagtccaggtgcgcccagcgggggtcagggcccccgatgacctcgtccaccaggtccgccaggtcgggcaggggctcgggtcgctccacaaggatgggcgcgaagggtcccaccagccagggcagcggcacggcctgcaccaccagctccagcagctcgtccacgcaggcgtgcgcgtgggccacgcgaccccggccctcggccagcgcggccgctggcacgtccctgaagcagcgggcatcagcgaaggcggtctgcagggcatccacactgcgccgcacctcagccaccttctcctgggcgccggcgggcaggccccgcacgctggactccagagcctctaccgtgccctgcagctcctgggtcaggctgcgggacagcaccagcgtctccagctctgcctgcagggggcggggacctcagtttcccctatggacgcccaggaggactgctgtcctgcctcggtttctctgatggacccacagtggagctgtcaacctgtctcatagacctcatagtcctgtcccctgtagacacagaatg[143 bp omitted]gcgaaaccccgtatctaccaaaaatacaaaaattagctgggcgtggtggtggacacctgtagtcccagctacttaggaggc[136 bp omitted]atggtttctaggctataggttcagggagagaatgtggagggagggaaagcgagaaggggcgggaagccagggactactgcttgcttgggccaacacccccctttccccccacctccctccatctcaaaaataaataaataataaaataataaaactccatctcaaaataaatacataaataaaacacacaatgggacttaaacctgcctcagtttccccccccagacacctcaactagctgagctcagcacttggtttgagatagcttgagttgggtccccggcagtactgggctgacccgcagtccgtcgctccccctcttcctccgcggcctggtggcagacaccacctcacctggcactcctgcggtctcacctggctccggcggcggctctccggagggcgctggccccattccccccacagctcgtgcaccttcccagggcaggccggggcggtgggggtcaccccacactgcatgtggtctatctgcaaggacagaaatggtggtcttcagagctgggggagctgggggagctgggggtcggggtggggtccaggaccactgatctggcctcagtaagcatttaggagaccgaggcaggttgtgcagggccgtggggaagacttgggcttggaccccaagggaggtgggagccatagagggctgtgggtaaagaagggacagacctgactcaggggctcacaggtgccctctggtggctgctgcggggagggaagagctgaggatgggaggattctgatgaggaggaaggctctcttctgacctaccctaacttgctataaattccagcttctccttcccctcttccacaaaacccctccctgactctccaggcagagccatgacatccctgggctcctccaggcccgggtcccccagccctgaacacatgcagctggagacagctgcacccagctccgcctcctgctttaggctagcacgggatccggtattcagctggtgctcaatccatactgattggcctgcatcccggagcaggggcgggcagcgggctctcaccagctccagcgtctcctgcagctgggccagggtgtcctgggcacggtgtttgctctgcctcagtttccccacagagtgctcgtaggccaggtggcggatccgtgctgacagggagccgaggcgcacaaagtagccctgctgtctcctctgatcctccaccgaacccacttcagggccttcagcctcagccgccagtgccgctggaggacaggatacggggacagcacggggacaggatacggggacagcacggggacaggatacggggacagcacggggacaggatacggggacagcacggggacaggatacggggacagcacggggacagcatggggtcagcacagccacccaccccctccacatctgctcacccacctctgggtacagaagccacaggttcccacattcacagttccccttgactgacatcaacccatttggtcttccccaaaccctaagatgtaggcactatggtgggccctgttttacacaggaggaaaactgaggcaaaggagaggtgagatcctgcaggatccaagaagcagacccagattggaacccaggcacgttggtcccaaactgcttaaccattttttttttctttgagatggagtctcgctctgtcccctaggctggagtgcagtggcactatcccagctcactgcaacctctgcctcccaggatcaagcgattctcctgcctca[133 bp omitted]ggcctcctaacgtgctgtgtttacaggtgtgagccatcatgcctggcctgcttaaccattcttttaagcagccttttaaaaatataggttgggtgcagcagcatgcacttgtaatcccagcactttgggaggccgagatgggaggattgcttgagcccagggaggattactttgagactagcttaggcaatacagcaaaaaaccctgtctctaaaaaagaaatacagaaattagccagggctgggcacagtggcgtgtgcctatagtcccagctgcttgagaagctgaggcaggaggatcaattgagctcaggaattgaaggctatggttagctacgatcacaccactgccctctagcctgggcaacagagcaagactccatctcaaaaaaaaattaaaattaaaaaaatgaatgaaaaataataaaaaaagagaaaatccacac[135 bp omitted]agaacaagaccccatctctaagaaaaaaaatttttttttttgagatggagtctcgctctgttgcccaggctggagtgcagtggcgcaatctcggctcactgcaagcttcacctcccaggttcacgccattctcccacctc[211 bp omitted]tggtgtgcacctctagttccatttgtctaggaggatgaggcaggagaatcacttgaacccaggaggcggaggctgcagtgagccaagatcatatcactgcactctagcctgggcgacagagtgagactccacttcaaaaaaaaaaaaaaaaaaaaaaaaaaaacaacaatggttgggcgtggtggactcacgcttgtaatcccagcactttgggaagtcaaggcaggtggctcacctgaggtcaggagtttggccaacatgcaaaaccccatctctactaaatacacaaaaattagccgggtgtagtggtgggtgcctgtaatcccagctacttgggaggctgaggccggagaatcgcttgaacacgggaggcagaggctgtagtgagctgagatcgcaacactgcactccagcctgggcaacaaagtgagagattctgtctcaaaaaaaaagaaaaaaaaattcaggagtgcctggcacacaagaagtgcctgatcaatgcctcactgcctttttttttttttgagatagagtctcgctctgtcacccaggctcaagtgcagtggtgcgatctctgctcactgcaagctccaccccccgggttcacgccattctcctgcctc[174 bp omitted]gcccggccgcctccctgcttttctgctgaggtgggggtaagcccatacattcttccagtactgtaaggccagagttggacattcacatggtctccagggccaggcaggtaccaaaaaccatcaaagtagatatgacataaaccactggggactagtggagctgagcaaaccatctgaaggagcagacaatattctggctgtgtctagtttttctttttttttttttgaaacggagtctcgcactgtggcctgggctggagtgcaatagcgcgatctcagctcattgcaacctccacctcccaggttcaagtgattctcctgcctcagcctcccgagtatctgggaatacaggcacacgccaccacgcctggctaattttttgtatttttagtagagacgggatttcactatgttggccaggctgggctcgaactcctgacctcatgatctgcccaccttggcctcccaaagtgctgagattacaggcgtgagccactgtgcctggcagtgtgtctggtttttcaaaacaagccaagaatcgggacatgtaatgcaaaatctggttgttaaatgcatgcaaagaatgaaaatatttaaaacacgctgcacaggcatttgggggccaccagtttgggacctcaagtctaaaagccctatatgcccttagggtctgggtgttctgactcctggcgggatgcaggttgaggggccgtggaagtgaccgggagggaggacaggcctggttttgagttgtatgtttcctgctgatctgctgtgtgaccttgggtgagtctcagacctctctgatctgtaccacaggggatggggacggggcaggactcaggggttagggttgagggtgtcgtcctcaccgagctcttcctccgtcatgggcaggaagtgatccaccagctcctctgatttttccagtacaacatccacagcatggctcacggagcgcttcagctccacgctccagcgccggcccctccgggccaggtccaccacacccgtgacactgctggccaccacgtccttggctgaggtcaccacctggaaggaagggcccccccactccaggcaccgtgggactccagctccatttctgccaccctagttccctggggctgggactcaaagatccctggacttctacctggctccgtgcctcagtttcccctataaaatgggtgataaaacccttccctcacagagggtgttgagggagttaactgcccttactagcaatacatatgtatacacacatacatatacatatatacacatatacacacatatacatatatacatgtatatatacacatatacatatatacttatacgtatatatacatatatacttatacgtatatatacatatatacactatacgtatatacatatatgtatacacacacacacacacacacacacacacacacacacacacgttgcagttattttaacctggctgttttttcttgagttaactaaaagcctggttgtcaccatccctccctccctcccgcctctaatctggcctgcccccactggaggtccccatgtctagtcgtccggggtaccgtctccgaaggttgctggagaaagggaagcttctcttccagcttgtccaggcccctgcaggcgaggctgttcatagtggccactgaagggagagaggcggggagtgagactcggggagacgcagagggagatagggacgcagtgagagttgtagaaggagggaatgctagagagagaagcagagacagagaaggaaggagaccaggataagacagggagaaacaaaacggaatgatggagacgagacccacaccaggagatggacaggctttctgagaccttacaccaagaagccgcttacaccaaagacgctggggcagacacctgtggcgcctggagagagagtctacgagggagatggggagaaggcctagaccacagggggacctggctgcctccctaggtgagactgggggccctgagggtgtgggtaggccgctgggttgggcactgcctcctctgccatcctgcctgggccctgccacccaccctgttctcccagcaccaaggcgacttttcagccgtgcccagctcagatggcccagcggacagactcaaggtcacagaagctggctgagagggaggtgaggaggtgctgggctaggaccctcaggtgaccctcttcctgggtcagactagaggccaaggatcctgtagtcccccgcctgtcatcggctcaggggtccacagagatgtgagaactacagagcggaggctgcggggcttaggacaggcagaggcaggtgcagaggggagggggcctggagagacaaatggacccaaggcacatcaggccaacaaaggaggggacacagggagacagatggatagggacagagaggaggggccccaccagtaaacaggtaagggcagagggccaggggatcagatttatttatttattttgagacagagtctagctctgtcacccaggctggagtgcagtggtgcgatctcggcttgctgcatcccctgcctcccaggttcaagcgattctcctgcctcagcctcccatgcagctgggattacaggcgccctccaccacgcctggataattttttgtatttttagtagagttggggtttcaccatgttggccaggctgttctcgaactcctgacctcaagtgagtgatctgcctgcctcggactcctaaaatactgggattacaggcatgagccaccgcacctatcaggggatcagttttttttgtttgtttttgcttttttttttttgaaatggagtctcactctgttgcccaggctggagcgcaatggtgcggtcttggctgactgcaacttctgcctcccgggttcaagcaattctcctgcatgagcctcctgagtagctaggattacagttatgtgccaccacaccgggccaagttttgtatttttagtagagacagggtttcactatgttgtccaggctggtcttaaacttctgaccttgtgatccaaccgcctcagcctcacgaagtgctgggattacaggcatgagccaccacacccagccagatttaaaaaaaaaattttttttttgagatacagggtctcgctacgttgctctggctggtcttgaactcctggcctcaagtgatcctccttcctcggcctcccaaagtgctgggatcataggcatgagccaccatgcctggctggtgatcagattaaagaaggacttaagtgaagagattgaggacaggtggcatggcagtgggacaggtggctaggctgaagatgacccccaggagtgtcatgcagatagaccaaggaggatgggacagggggcggtgggggggtggcaagccacagctcccagggacacgggccagggcactcacgctggggctgcaggtgctcgagcagcggctgggcgtggtccagggcacgggtggtcaggccgcacacgcagttctcagccaggcggcaggcggagcccagcagcgggtgcctgtccttggctgcactgtaaacatcgcagaccgcggtgcacgtggccctgaccaggggcagagccaccacacgctgcaccacgttctgcgggaagggtcggcatcagggggaccctgggggaagtggggccctagccacacctcaacctacttcccctctctgggccaggacgagggatgggagagtggaaggatggagtactgagcaccccgccacgtagaggcagtgaagataaacgtggatgtgagaatgtcatggttcctgcactcacaggctcctcttcccatggcgtacacagagcattacaattttgtttgtaatggggtttcactcttatcacccaggctggagtgcagtggcaccatctcggctcacggcaacctcctcctggattcaaacgattctcctgcctcagcctcccaagtagctgggattacaggtgcccgccaccacacctggcaattatattataagagggagtctcgctctatcgcccaggctggagtgcagtggcacgatctcggctcagcgcaacctccgcctcccgggttcaagtgattctcctgcctcagcctcccgaggagctggaattacaggcatgcgccaccatacccgttttttttgtttgttttgtttgtgtatttttagtagagatggggtttctccacattggtcaggctggtctcaaactaccgacctcaggtgatccacctgccttggcctcccaaagtgcagggattacaggcgtgagccaccgcgcccagccaattttgtttttatttttatttttagtagaaacagggtttcactatgttgaccaggctggtgtcgaactcccgacctcaggtgatccacccacctcaggtgatccacccacctcagcctcccaaagtgctaggattacaggcctgagccattgcacctggtcacaatttttttgttttcaatagagacaaggtcttgctctgttggccaggctagagggcagtgattcaagcacggctcactgcagcctaagcctcctagcctcaagcaatcctccaacctcagtttccaagtacctgggattacaggtgcacaccactgtgcccagctaattttattttattttatagagattgggtcttgctgtgttgcccatgctggtcttgaactcctggctcaagcgatcctcccgcttcagtctcctaatatgctgggattataggcatgagccactgcacctggccaaatactatattttttttatctgcatttggttgaaaaaggtctgcatacttctgtctcctgggttcaagagattctcctgcctcagcctcccaattagctgggattccaggcaggcaccaccccacctggcttttttttttttttgagatggagtctcgttcttgttacctaggctggagtgcagtggcgtgatctcggctcactgcaacccccgccttcagggttcaagcggttctcctgcctcaggctcccgagtagctgggaatacaggcacccgccaccacacccggctaattcttgtatttttagtagagacagggtttcaccaagttagccaggctggtctcgaactcctgacctcagttgatctgcccgcttggcctcccaaagtgctgggattacaggcgtctgagccaccgcacccagcctgacctgtgcagttcaaacccatgttgttgaagggtccactgcgatctgtctgctcgagggaggagatgttagagtctgggggttcagagcactgcccctggagcacagtggcctctgttcacttctggttcagctgcctgcaagttgtgtgaacttgggcaagccactgaactgttcggtgcctttgtttccccatctatgaaatgggttactagggttgtgatgggtgttcaaggagccaatatacatgaaacggttggaactgtgactgatacagtgattgctgctcttactattgttgttactgagggcgccatgatggtggacgtggagacagaaggatacaggtggagacccagggatcaaaggagagggaaagggttgggtaggggccacagaagccagctgggtgtctttgagagacactcccctcccagggcctcattaagcccccactaggaaatagaccatcccctccatggaccaaaatattttatgactcaggttttcccagcaaggagaggagtggggcgggatacctggcctgaaacgctcctagaagggactgtcccacacaataccttctgtccctgctccatgggaggggcagccctcacctgctggtcctgctcccacacactggatctggggatctgagccgcctcttcttcagacatcgtgctgcaaacagggtcaccctgcggggcaggattgagtaaggggagcacctgcccaggcatcagatcctgtcaaattgggctctgtgacttgagcaactctcaaacctcttggggcctcagtttcttcatctgcataatggggcattctgtggagctcagacaatgcatgtccagagctctgtacacagagggtgtccaataatgagcctctggcaaggtagggttgccggagtgactcgaagcatggtctctgaggtgagaaagacctgggttcaaatgctaccattaattgcggtgttatttttattatttttttaaagacagaatctctctcgcccaggctggagagcagtggcgccatcccagctcactgcaatttccgcctcccaggttcaagtgattctcctgcttcagcctcccagttagctgggattacccacgtgccaccatgctcggctaatttttgtatttttagtagaaaccgggtttcg[132 bp omitted]ctctctgggctgcttcctgttttgtaagatgtgggaggtccctgctacccctgcggcccctgcctgggcccagaactgcccaagcaccctagacggctggaggtggtagctgctgggtcccagtccactcacagctcatttgacagacagggcaactgaggtacgcagcaggtccatgctggtcccaaggtcacgcagccagctagagttacagggggggagctcgacctcgggcctcagacctgccgcctgcgatccctccggttgccaccccgcgtcctctgaggcctggtcctcgcccaactgggtcctgagctggggccaaccgggccaagggtcccagccacctgctctggccggtcatacccgtcccacgccgccggaccttcgcccaaccaccctatctggagctcctctcctaagcccgggggggcgctcccggacgccgccctcagggcactcacctgggcgcgagcggcttcagacaccagctgtctccgccgaccccaggctcgagtctccacacccccgccggtcccgcccgcccttcttatagctgctcgcgcagtgggggcctccggaactgaccaatggggagaggccgtgcgggggcgtgcccagggggcgtggctccaggcttccctcgccctctccttgagctggcccagtgccctacggttgccatagtaattcgggagcgctagattcaaaagattgagctattatacgttcccggaccaagtttggccacctgtcatcctcactgctgttgccatagagacagtccatgcgatcacagcccccatagccctgctgagtgaccttggccaactcgctgatgacttttcttattaattattattatttatcgatttttgagactgggtcttgctcggttgcccagggctagagtgcagtggtgtgatcatagctcactgcagccttgccctcccaggctgaggtgatcctcccgcctcagtctcctaagtagctgggaccacaggcacacaccaccacccccagctaactttttaaactttttgtagagacgagatgtccctgtgttgaccaggcttgtcttcaacccctgagccccaagtgatccttccacctcagccttccaaattgctgggattacaggtgtgagccattgcacccagcctctttttatttcttaatctgccccttaactaagccagaagccaggccttccctttccctaggatccccatttcacagatgagcaagctgaggctcagagatcataaaacacttgccccgcataccacagcaagtg[136 bp omitted]gcctccggagtagctgggattacaggcgcctgccaccacacctagctaatttttgtatttttagtagagacggggtgtcaccatattcgtcaggctggtcttggactcctgacctcgtgatttgcctgccttggcctcccaaagtactaggattacaggcatgagccaccgtgcccggccagggatcctattcaaacccagccctgctggacctcagaaccctgccttttcattgccttgcctggaatgaccacagatgtaggcatggtctttttatttttatttttatttttgagacacagtttcactctgtcgcccagcctggagtgcagtggcgtgatcttggctcactgcaacctccgcctcccaggttcaagtgattctcctgcctgaccctcccaagtagctggtattacaggcacgtgccactgtgcctggctaatttttgtatttttagtagagacagggttttgccatgttggccagtctggtctcgaactcctgacctccggtgatctgcctgcctcagcctcccaaagtgtttggattacaggcatgagccacggcgccaggctgcatggtcattttttagggagctgggaaaactggacatgcccccaagccccagggtcttccaaatccgattgcagcccccacatggccaatgctgtatcagcaggtgggcccgggaccctgctcatcccttcagccccatcctgcccctgcaaccttgcccgggggcaggtgcccccttcgatgatctcaggtcagcatgacaaatcgtttggagacctgggcaatctggtttaacttaaaccttctcctaggacacaagccctggcagaaatccactggtaaaatgacacccgggcaacagtcaaggttttatttccagttaggtcccaggatgggggaagggagaggagaagtcacaggccattgatcccaactgtcatcccctagggagaccatatcccacaccccagggcctgggccatgcctcttttcctccttcaccctggagtcctgggaagttgatttgagaagatgctaggaacacaatgaaagccaattcatccgatccagttttcaagggttatttattaaaccccttggttctgaccccaagctaagtgggactcagcatcagaccctgcactcagagagccccctgacttggggaagacagagtcagagaaaggcagccccagtgtggccagggctcagctggaaggaaggacaaggggctgggagaacccagagttcaagagatctgggaaacagggaacggcattccagacggagggcacaccttgggcatgggtaaggaaagcccatcgtgtgttctaggaagcatggatggatgaaacggggtcccagccgctatggacagccccgagtttcacctgtaaaaggcaggattatttgtttttaattttaattttaatttttttgagacagtcttgctctgtcgcccaggctagagtgcagtggcacgatcttggctcaccgcaagctccgcctcccaagttcacgccattctcctgcctcagcctcccgagttgctgggactacaggtgcccaccaccacgcctggctaattttttatatttttagtagagacagggtttcacc[135 bp omitted]taccagaccccccaccctcaacccaagcccctggtctcactgggacttggccactgccaggagcgtctggcccttcacggcttcaggcccagcacagcgcgtgtcattctgggaaaacatcttgtctttttgggcctgaagccaacgatagaggtcgctcaggttctggtcacagatccaggggttgccggagatgtcgaagccatcccgcatgtcccagtttggctgccctagggatgcccagagcccctcgggcacgctggccagtgagttattggagaggtccagcatgtccagctgccgcaggccctggaaggcaccggctgccaccctggccagcttgttgccgttcaggaagaggtagcgcaggtccggctgcggcaagaggagatcttttcccagtacttgcaatttgttgccttctagatgtagccgttctaattgcagcggacccctcaggaggtcaggtggcaaggtctccaactggttctccccaaggtcaagggtgcgcaggagggtgaagttggccagcagcccggggggcagtttccggaggcggttcccagacaggtccagatgccccagagctttcaggccgtgtagccacgagacctccaggacctccagctggttttctttcaataccagggtgtccagggtggctgaggcctggaagaggcccgggggcagcccggtcagggcgtttcgggttagatccagcaccctcagctgcggcactggccgcaggaattcgggcgagaggctttccagcccattgctggagaggtgcaattcttggagcttagaggcgccctggaggaggttggctggcaggtgggtcaggttgaagaattccacggccaggtgcacggtgtcggctggcaggtagccggggatttcggcaggtggttgacaggagatggagctgccatggtctgagcggaacacctggcagtctttggggctcagggtgaccccccaggctgaggctgccaacagcagcagcaggaacagagttctagaaacatggggttgaatgccccctgggctgcaggcagtaacagaagatgcttactaaaccacagtgaaaatacactcagctaggtgaaaatacaccagcaaatccgcccacttcttcccatctctgcggctaccagcctggactatgctacctcatctctcacctgtactagggcagttgcttcctcctcctcttccagcttctaccctcacccccgacagctgccagaagtggcccctgttccagggagaattataattctaggaaagttgagtttctgagtgtaactcccgcataatatgaatacacttccccatcaccagcctagcccccatgagctgttaattattcacagtccaacttgctagtttcttctgatctggcttattttctgggtcagtccttgtctccctggctctgtgttttgatgtgaactcctattcatccttcaaagccccagctccaatgccctcttttccatgaagacttctctgctctgggatcctggtctttttgtccactcttgaccaattgggtgcttggaggaagacagacgttcaggttcatgtttttgagacagagtcttgctcagttgcccaggctggagggaactggcatgatcacagctcactgcagcctctgaacatgaaaagtgtgtcctgctttggccaggtctgagggtgggcatttggccttgggaagcggtggtttacacttagcaccacaacccttggaagcctggggcttcccctcctcctccagggcttccctggcccggcagccatcagacatgatctcgacagccttggtcactgtggccccaggcctctaacaagaagcctcccccggctccctgctgcccatgcccacctgggcttctgtaggggtgtgtgtgtgtgtgcacgcgccagtctttctgtcacagataaggttgatctgtgccagccaccaggcctgtatctgctccctgtgacttctatgggttagctggaatgtcctgtatctccgcatggtctggcgttcaaacctgcctaggacaggtagtgtggggacctacctttttggtcgctgtctgctccaagaggacatggtagctctgctcttttgcttctgggttgtcctggcctgcggaggtggccttatacctgcctggactgggggcaggggaaccaaccctggggaagtccccacccccgtccagttcctgataggggctgagcctaagccaggcaggggaaggggaggggtcaggattacaaaattgcttcctggaaattgtttcctgttcaacccctttttgaccctgcttctagaacacaggtttttctttccttgcttcctgatttttggggggcatccaagagtctctctagttgcatcctcacttcccccaacccggagttcaagggtcaaggtttgcaaggcactattcctggagacagggacagctctctgagcaagaggagggatttaccataaacttgagcaacccagaagctcactgaaaagaacaaaaaaactcgtcttgatttcatggtatgttgatattgctttttttaaaagaagtcattttaaaaatacagtccaatagtgagtaatgccaaacgtctctacggtccttagacagtggcttgggaggaaccaaacctggttctgaattccagctctgtcatgaacacctttgctttgtgacctttggcaagtgacttaacttttcttggcctcagtttccccatctatgaagctgaactcaaatctccaagggctccttctgcccttttttctcttcatctgaatctgacatccatgctattgtttccattcttcctcatttcctattaaatgcgtttggaggctacaaatttccctttgagaacagctttggctgcatctcatggacttggctgcagagtgcttgcattcttgttgagttctaaatatttaggtatgatggtgtcacctttatctgcagctatgactattttttttttctttttttttttgagacagagtcttgcactgttgcctaggctggagtgcagtggcgtgatctccactcactgcaagctccgcctcccgggttcacgccattctcccacctcagcctcccgagtagctgggactacaggcatgcaccagcgtgcctggttaatttttatatttttaatagagacaggattttgccatgtggcccaggctggtcttgaactcctgagctcatgtgatccactggcctcggcctcctaaactgctaaaattacaggtgtgagccaccatgccccgtcatttttttttttttttgagacagcattttgctctgttacccagcttggagcagtgtggtgcaatcatagctaactgtagctttgaccatgggtccaaggcctcccaagtagctgggactacgggcacgtgccaccatgcctggctaattttttttgagatggagtctccctctgccacccatgctggagtgcagtgatgcaatttcggctcactgcaagctccacctcctgggttcaaacgattctcctgcctcagcctcccgagtagctgggaatacaggcacatgctaccatgcctggctaatttaaaaaattcttttgtatgttacctaggctggtctcaaactcctgggctcaaggaatcttctcagtctctcaaagtgctggggttatagacgtgagccactgcactccgtcagtcttgtgccctgcccagtctccggagcccagccgttagttggtcttaatcaacatggactgagaggaaggaaggcttgtgaaatgtagtgacacagtaacaaaacgatccattaaaatgaaatgagatcacatccctgcttaaaactctctgatggcttcttgtcccacttaaaacaaaattcataaggctggccaggcgcagtggctcacgcctgtaatcccagcattttgggaggccgaggcaagcggatcacctgagttcaggagttcgagaccagcctgaccaatatgatgaaaccccgtctgtactaaaaatacaaaaattagcggggcgtggtggcgggtgcctgtagtcccagctactggagaggctgagacaggagaattgcttgcacccaggaggcataggttgcagtgagccgagatcgcgccactatactccagcctgggtgacaaagtgagactctgtctcaaaaaaagaaaaagaaaaagaaaaagaaactggctcctatgcagatgaagatggggaccccgaagtctccatgtttccacactcagctccccagatttgttttgacccagccttttttttttttttttttttgagacagcgtctcgctctgtcacccaggctgtagtgcagtggtgtgatctcagctcactgcaacctctgactctcagattcaagctattcttctgcctcagtcggccgagtagctggaattacaggaacccgccaccaagcctggctgattttttgtatttttagtagagacggggttttgccatgttggccaggctagtctcgaactcttgacctcaagtgatctgcacacctcggcctcccaaagtgccgggattacaggcgtgagccaccgcgcccggcctggccttgacttttgagggtgcccccacccgtgccacccccaggaggcagagcagagccagagtcatgggggccggtggttgtaaacagagttttattgatggggagggggctgggggaggcaaactccagagagggcagaggacccagccagccacgtggcatgcatggtcagctggaggtcagaggggggaggtcacaaggggacgggtggcatgggactctctcaccaccctggggccgtatttacagaggggccccacccaccttcgccgccccccaggcccccaagccctttagacagctgctgccgatgtgacttccgggcaggccctcctcgtgtctcctgcctgaaaccccggcattgtccccgcttccctctgcagagtggggggggttcaaactcctaaccggcacctcggagacccccgggccttctggaagccccagcgtcggctcagccaacgcccaggccgctggggccaccacgatcgtcgctcgtggacacacaccctgcacgcgtggcccacttgacacacacgcccacagcagccttcgctggcacgcacacacacgcccacctccccggccccttgcacacgaacacggcacgcacacgcacgcacacccacacacgccaggggcctgggttggggagggacctttccaggggtgggggagggcttaggtctgcagctgtggccccccattccccaccggcgtccaagcctcccctgcctgccgccaccccgagaacggagttgtgcaattggttagaaaaccgcaaaagaaaccaaaactgcaaaaaaaaccaaaacctacgcgcataaggtcaacctcaaatccatagcaaagtcctcccgcccacccacccccaaaccgtctcagcgtcctgcggccccgggtagggggagggcgagctggttgtgcttccttgtggcggagggggccccccactccgcgggtgggtcgcgggggggacttgagcacccactcggagttgccccgggccccggcgttctggcaccgtctctcgctcctggttcccgtggctggcactgccaaggcatcggggggcccccggcctagggcacggggggcgcagtcctgtccgcccccccataggggaggaggtgggccaagtctgtgcccggccgggcgtggcagccgcggtggcggtccccaggccgggcctcgccgctgttgaacgtgtgggtgcggcgcagggtggcggccggaggggcgtgggggcccagtggcctcctcaggctgcccgtcgggggcgggctccagggccgcgggaggccatcggcggctgaggctgggtccaaggggcccgtgggcgcggacaccacccgccggcggtccgggctggcgtggggggtgagcgggaagtcgccgtgggaggcgcggccgggccgggcagcatagaggcggccgtcgggggtcggctccccaggcgcggggggctgctcgggggcccgggcgggcgccagcagcaggagggaggatgaagcggaggccgggagcagggggtggccgtggtcccaggcgcgggggcccagggcgtgggggtgcgggtgcggagtgggcaggcgcttctgcggcagcggcgtctgctcgggcgtgggcagcagccccgagtccaggtcgtggggcccgccctgcagcagcgtggccttggcccagccgttctgcatcaggggcgccagcagggcctccgggggaaccccggcgccaccgccaccgcctccgccccggcccccgggaccctgcgccctgcgctcgcccaggcggctgacgctcagcaccgcctcgcccgccccgtgcgccaggatggcctccttgtccttgcgccgggccagctcccgccgctcacggaggcccacgaaccagcccacgctgaagccggacaccacggctcccaccacgaaggccgccaccgacgacgttaccagcaggttcaccgacaccagccccgcgcggtcctcggagaggctggcccgcaggagtcctggccggggagcacaggggggttagtggggccggcggggtggccctgggcatccctcctacctcctcggggccctctgtcctcttttttattatttttatttttttttatttatttattttttgagaaggagtcttcctttgtgtgccaggctggagtgcagtggggcgatctcgattcactgcaacctccgcctcccatgttcaagtgattctcctgcctcagcctcccgagtagctgggaccacaggtgcccaccaccacgcccggctaatttttgtatttttagtaggatggggtttcaccacgttggccaggctggtctgaactcctgaccttgtgatccgcccacctctgcctcccaaagtgctgggattacaggcataagccaccacgactggccttatttttattattttttaattttttttgtttgtttgttttgagacagtcccccaggctagagtgcagtggtaaagctcactgcaaccctgcctccagctacctgtttgttttattaaagacaggatctgggccaggcatgatggctcacacccataatcctagcattttgtgaggctgaggcaggagatcacctgaggtcagaagtttgagaccagcctggccaacaagtgaaacccatctctactaaaaatacaaattttagccggacatggtggtgtgcgcctgtaatctcagctacttgggaggctgaggcaggagaatcaattgaacccgggaggtggaggttgcagtgagctgagatcacactactgcactccagcctgggtgacagagcaagactctgtctcaaaaaaaaaaaaaaaagacatgttctcactctgttgcccaagctggagtacagtggcctgatcacagctcattgcagcctccacctccctgggctcaagcgatcctcccgcctcagcctcccaagtagctggaactacaggcatgcactgccacgtctggattatttttgggtttttgttttagagacagggtttcactatattccccaggctggtctcaaactcctgacctcaagtgatcgtcctgtcttggcctctcaaaatgctgggattataggcaggagctgccgcgcctggccccttctgtcctgttgaagttggtctgtctgccttctgttgtctcttcgtccttgccaaagcctgcctgtttcttggtgtctctgttcttcccctatctccctccccaataaatgagatgagaccaccccatgcctttcttttctttttttgagacggagtcttgctctgtcgtccaggctggagtgcagtggcgtgatcttggctcactgcaggctctgcctcccggattcacgccattctcctgcctc[224 bp omitted]cccacccacctcccagaggattcgagggtcctccagcctcctccctcccctcccccatggtagtgggggatgggggtcttagcctgccgtccccccaactcacctgtgcagtcccctaagcctgaggtgctggccccggacacgtcctgctcaaaggcggctctaatggggagaggaggcaccgtcagcagaggcccctctcacagtcagagatcagggggatctgggatcatgggcgggtctgacacaccctccacccacctccctctcccgcagtacctggtgcccgggctgaggaagatgcaggagccgtcgggggcccacccgcagtaggggtcctgactgccgatacagttcctagagcagaccagggaccgaatgggacaagtgtccaagtcacttacacaaccccaatggtgatggtgacctgtgggccctgttccaagcacctgcctctttatttttattttaattaattaatttttgagacggaatttcgctcttgttgtttatttatttagttatttttgagatggaatttcgctcttgtcgcccaggctggagtgcagtggcgggattttggttcactgcaacctccgcctcccgggttcaagcgattctcctgcctcagccccccgagtagctgggattacaggcacgcgccaccatacttagctaatttttgcatttttatcagagacagggtttcaccaggttggtcttgaactcctgacctcaagtgatccacccgcctcggactcccaaagtggtgggattacaggtgtgagccaccacggctggcgttttcttattttaaaattaaaaaaatttttttaaattaaaatttaattttttttttctttaagagacagggtcatgctctgtcacccaggctggagtacagtgtcatgatcatagttcactgcagcctcaacctcccaggctcaagtgatcctcctgcctcagctttctgggtagctgggaccacaggtgtgtgccaccacgcccagctgatttttgcattttttttttttttagagacaggctctcactatgctgtgttgcccaggctggtctcgaactcctcggctcaaggagtcctcctgccttggcctcccaagtgctgggatgacagacgtgagctaccaagcccagtccctcttcttaatagcaacttctggagtccttagaacaaatctgtgtgcagggcactgttcactccccactttacagataagcaaactgacgctccagaaagtaaatgtttgcccaagtggcagagctgagatgggagcccaggcatcgtgccagaggctgtgcccttggactcggagctactgggtcattgttgcaataacggcgggcaggaagcagggtcctccgcattgacggctcacatggagtgcaggcgtgtgccagcactggcatgcatcctagctttcctcccattttagagacggggaaacagcctccaccctggtccctggttctccttcccctgcagtctcctcctggcagcagccaccagagggcacctgtaagcacctgagtcagggccagtccctcctctgcctgcaaccctacatggctcccatctccttcaaggtcaaagcccaagtcctccccgaggctcacaaagctctgcacaaactgcctcgtcctctcccatcccctccccgtcctcccctcctccctcactcccccttgctcactgtgctccagccacaccggccaccttgctgttcttccaacacaccaggagtggtcctgcccgcgggcctttgcacgggccatgccctctgcccagctcaatgaccaggacatcattgggcttttgactggaacccagctgtccctccctgtgcccatcctcccttgcttcccgcccacggctggcctggggtggacactcacttcatacaccccgagtactgctggcagcgagccacaggcactcggaccacgcagcgggggaaggcagccagcaggccccccgaagctgcgtccagctccaagctcagcagccgctgccctgtctcgccaccgccgggccgtccacacctggggacaagcagagtggtgaggctgagcgcatctcagcccatctcccctcctgctggcgaccccttcccacctttgcccagacttacctgtccggccggtaggtctcaaactcctccaggaagacactgagcccagacgtccctgaggtgctggcattgggccggacgaggaacttgaggaccgtccccgcctcagaacccaggaagacaacggtctggttgccccaggggccggctcccacgtccacagccactcgagtcagctggtgcctgggggacagggcaggggagggtcaggctggccccatatcaccacatgccaccaacacgggcatggccatagttacacgggtgcatacagacactgacacaccaacacatgtgacagcaataaatgcgtgtgtgcatggatgccggggacatgcgtgactacacaggcacgtgggcacactcgcccttttttgaaacataaccccaaaccaggctctcctcagccctgtctctttggttgagatggagtctcactctgtcacccaggctggagtgcagtggcgcaatctcagctcattgcaacctccgcctcccgggttcaagcaattctcttgcctcagcctcctgagtagcagggactacaggcacacgccatcacgcctggcaagtttatgttttgttttttttgagacagagtctcactctgttgcccaggctgcagtgtagtggctcgatctcgcctcctgggttcaagcgattctcctgcctcagcctcccaagtagctgggactacaggcgcacaccaccacaccgagctgattttcttttttttgtatttttagtagagacagggtttcaccatttggccaggctggtttcaaactcctgacctcaagtgatcctcccgtcttagcctctcaaagtgctgggattacaggcatgagccactgtgcccagccccgctttctcctgatatgtatgtgtgtctgtgtatctttcagtctctttctctctttgtctctcttccctatctctgtctctctgggtgtctgtctgtctctgattgtctctctccctgtctctctgtctctttccccctttgttctcctggtgtgtgtctgtctgtctacctctttttttttttttttttttttgaggtgtagtctccctctggccccaggttggagtgcagtggcgtgatctcggctcactgcaacctccgcctcccgggttcaagtgattctcctgcctcagcctcccgagtagctgggactacaggcgcccaccaccacgcctggctaatttttgtattttattttattttatttttgagacggagtttcgctctttcgcccaggcgggactgcagtggcgtgatcttggctcactgcaagctccgcctcccgggttcatgccattctcctgcctc[222 bp omitted]ggccagggtggtctcgaattcctggccttaggtgatctggcagcctcggcctcccaaagtgctgggattacaagcatgagccaccgtgcccagccccatctgtcacctcttgatccctctgtctctctctttgttctctctttcctagtgtctctccatctttccctctctgtctctctgtgtctccagctctctgggcagcgccggaagccatgggctcatctgtgttgagcatctggatcctctcaccctccatctaccccatcctgtctcccctcgccatgccctgcctctccaggaccgacctcatcagggtccgcaggatccagggcgcatggcccagcgagggcaccgcctcgtccatcagagggtgggtcttgacaaagttgaggatgtcatccggcaaggcgctggaggcattgtactgcatcccgggggctgcgcagcacccgggcctgggggtgacaagggtgtggtcaggacgaacgtaaaggttctcataaaggggcctgattcaccagaggtacccattgctttgcccaacgaccctcaggttttttgtttgttttgtttttgagacagagtctcaatctgtcgcccaggctggagtgctttggctcactgcaacctccacctcctgggttcaagcgattctcctgcttcagccacccgagtggctgggattacaggcacgtgccatcacgcccggctaatttttgtatttttagtagagacagggtttcgccatgttggtcgggctggtctcaaaccctcgacctcaggtgatctgcccacctccgcctcccaaagggctaggattacaggcgtgagccaccacaccaggcctcagtttttcccaactgtataacgggtacagctgaactcagcatcagctaaataaccacccggaagccccagccctcggccctggggatcaggacctcatccgggcatgtgactcaggatggagggggttctcaccggggtcgaggcacctgatcctccggcaccggcgtccagatggactcgggggacttctgctctcggaagcggccttcaaacacagctgccacctgtgtcaggtcaaaggcgcagacagccgagccagggatgctgaggggttgggatgaaagagtttggtgagcccggtgggaggccccatctcggacaagtgcgtgcaggagcctctgtctgcaggagccagtgaatcttcagtcttcctaggccagagatgtcccctgtccctcccgcatctgtcgaatgcagccactcctcctgaataacatctcagattgggccacagttcagggtctacgaggccacccctgtccaggcccccatccctgtttaactggatgtcctgcctgcccagtgtcactgttagagcccactccccagcaggcttttttttttttttttggagaccgagtcttgctctgtcgcccaggctggagtgcagtgacgtgatctcaggtcactgtaacctacacctcccaggttcaagcaattctcctgcctcagtctcccgagtagctggaattacaggtgcccaccaccacacccagctaatttttgtatttttagtagagatggggtttcaccatgttggccaggctggtttcgaactcctgacctcaagtgatctgccctcctcagcctcccaaagtgctgggattacaggcgaagccaccgtgcccagtccacaagcaggctttttaaaaatgcaaaccttggccgggtgcggtggctgacgcctgtaatcccaacactttgggaggctgaggcgggtggatcacgaggtcaggagtttgagtccagcctgaccaaaatggagaaaccccgtctctactaaaaatacaaaataagctgggtgtggtggcgcacgcctgtaatcccagctactagggaggctgaggcaggagaattgcttgaacccaggaggcagaggttgtggtgagccgagatcgcgccactgcactccagcctgggcaacaagagtgaaactgtctcaaaaaaaaaaccaaaccaaacaaacaaacaaacaaacaaaaaatgcaaacctgatctcatccctcttgctcttcactcttccatggctccccagtgctctcagggaaaaagtccaagtttctgcctgcagcccacaaagccttgcctgatccatcctaccagttccctgctttcctgttgtgcattctcccctagttcccttcccacacagactctctcacgattacttaagtatactgaactcactgaagcctcaggacctttgcacatgctgtttctccaactttgaacacccttccctcttcctccatctcacacccaaagtccagctccaatgtcccctcctccaggaagccctccctgctcctctccccaaaggcagaggatgaggatatctttggcccagttctgaccaaagggacttagagggtcagtgtcagcttgtcccaccccagcctggggccgaggcctctcagaggtctaatccagtggtgcccaacctagcacccagggcatacctgaggagtgaatacaggccctctctacccatgcccaccaaatgctcccagtttgctcccattggtgggcgctgacctgttgctgggcgtggaaaaaacggccaggaccacgggccggcccccgaggctgaccacgcccgtgacagcctgcagcacgttgaagtagaaatgggagtctccgggtacagagcagttgagccgcgccttcaggaaggacgtccactgcttctccagcacgcggggggagcctcccacgtcgttcttgcacactcgggccacgcgggacaccaccacctgggcgtgacagtggacggacgggggcctgagctctgtgtcccaggaaggcctgttcacaggctgtgccactcaccacccaaactgtgatggaggagtctgaccctggctctggtgggaccccggccagtcaccgttcctctctgggcaccggcttccctggcagaaattcccggtgggaatgtcaatgatgataatagcaacagtgacaaccataatcatcactgtttccacgaagacccacattttattctcacatctcttacactcttcccgaggggggcctactgatatccccccattgtacatgtggggacactgataagaggcacagataaaaggaagtgactggtccaaggtcacaatagtagttagtggcagtctgtgcacttcagcactgcctggttgcctggatggacggatgagtggatgagtagatggacggacgattacaatggagggatgagtaggtggatggataaataaatacatctgaagaaggatgatagataatggaagagatggtgaaggagaacaaggtaatcaagcaattggtagataagtagatggatgtgtgggtggatggatgaacagatggatagagagaaagctaggtgagtggatggatggatgcatggataggtgaataagtggatgaatgaatggatggataagtgggtggatggatggatggatggatggatgggtgagttgggtgggtagatggttggatgggtgagtggatggatggatggatggatggatggatggataggtgagttggatgggtggatggttggatgggtgagtggatggatggatggatggatggatggatggatggatggatggatgggtgtgtgggtggatgggcagataaatggatggatagatgggtgggtgcatagatgatgagtgggtgaatgagatggatggatagatgagatggaagggtggatggattggcagatggatggatagatgaaggatggatggatgggtgggtggataggtagatggatgaatggatgggtggatggattggcagctggatggatggatggatgtgtggatggatggatggatggatgggtgggtgggtgggtgggtgtgttggtggatgggtagataaatggatggatgggtggatgggatggatggatggatgaatggatgggtgaatggattggcagatggatggacagatgatggatagatggatggataggtggatggactgatagatggataggatggaagggtggctagatgaatcgatgggtggatggatgcatggacagatggatgagtgcacggatggatggtagtgggtggatgagtgagtgggtgggcagatgagtagatggattaatgggctcatgaaagtgtgggtgggctgaagaacagacagatgggtaagtgggagggtgagcaggtagacggatggacaggggatgaaggatggataagtgattgtggctgggtgggtgggtggacaggtgaacagcaacagcaccaggtgtatctgacttccaactcaagtccctcgtcagggctgagtgctccacggctgctccgtagatgtcttcagcctcagggcctgatcatggctggaaaggaggccctggggaccagaaatggagggcaggaccctctcaccccatgcagggattcatggatccacctctgccccctcacttcgcatgatcagagcctctcaacttcatgccccactgcaccggcctcaccttctccaggtagttaaactccatcgcaatctcccggaagaagaagtagacatggctgccccactccaccgcatggacaaagtaaggctctgcaggacaggaggggtcagaactcagcccctgacatgacaaagggggtttctggggctaagaactcactggcttttatggtgaaggggggacataggctggttacccagacaatatgaaacagactcaaagtttggtattttgcaggggaagggaggtcagaagcctaaaatcgctgtgtctcttgctgcaaatggcaacatcaactattttttgttatcttcctccctcatgtgttgaagagctgagtcctgctatatcttttctgtggttccattttgggcttctaagccacccacttccagcgggttctactttagatccaactaaacttgttcctctagctttctagtcttcaaaaaggccaacagattccaaagatgtggtggaaatctctccaccaagctcctctgggactcttattctggtggggagatttgatgaatgtcaggttctgggccctgccaggtctgggcccactgcccttcctggtctcacctttgaaccacttggagtcatgtttcacggtgcgcagggtgggcctgtccccgaggctgcggtagatgacagcatcaatggctaggaagtcggtaacagtagctgtgaagagcatcccgtctggatggggtgggtggggaaggcaggcaagagatgagaccgcagaggccaggggctgggtgggtcgaaactcgattttctgagactgagtcctgagcctaggggagcccctgtctccaggctgagccctgatcccatccaagccccacctccatccaagccctgaccttaactgagcccctgaccccggctaagccccaaatcccgctgagcctcaatcccagctgagccccaaacctgggctgagagtctgcccatgtcacagctgggacaagtggtcgtccagctgccttctaaacaacccagacgctggagtagaaaatgccaggtcttgcctgtggctggggctgatcagatggaggttgggggggtacttaccagagaagagggcaacattggcgtgcttggggtcgtacgggcagcgggccataccgctgatgttgtctccgacgggctgcagggtgtctatctgcagggaccatggggcctgagtgacagatctcctgaccccacctagcagcccctggctccctcagccccccactccagggggaatcctgatccaccacggattactgtgtgaccttggccactcacttaacctctcagggcctcagtttactgatctgtaaatgggtttaagagtcaatgcctagttagacctgtaactggctcattacctaagtagctacggcttccccggccccctgtacaggcctcgtttggacagcgctgactcctcttgagctcagggggaggaggcagggagagtatatccaggaaggcttcctggaggaggtgacacggcctggggaaaagccatggccagcggaggtcgggcgagcagaggcctggaggttggacctggggcgcagggagtctgaagactcacgctgtagttggcgcacaccgggttgaaggcgttggaaccgcacacaaagagcgtggactcgtcccgaaggagcagcacctttacgaagtttcgacactcgccctgaggtggggacaggaggaagcggggagcgcgatgtgggcgtggtcatggtgatgggcgtggccagaacctgagttgtgtgggtggagggccggtctgttgtgggcatggccaaggcaggggctgaacctaggactggctggggacacggtgcgacccagacagggaaacactttgtatcagcaacgcaggcaaggccaggatggtgggcattgtcagactgtgggcataaccatggcaatagcagagtcctaacctgggatggaggagaaggatccgccctgggtgtggtcacggccgattggggtggggcatggtcgtgaccagaactaactggggcgtggtgggcacggttatagctgattggggccaagttgggagcgtggccagagctggtggggtgggcgtggcctgggcttattggggcgggccgggggcgtggggggcggcaggactgataggggaggggtcgggatggggacctgatcgattgggtggggagtgagctattgggtggcgtgtgaacatggcctgggcttgttggaacgaggctgggggtggtggtaggactgacaggggcagaagtgtgggcatagccagaactatttggggcgtggttatggataattgtggctaggctggaggccgggctaggaccaattgggtggggacgtggacgtggccatggctgtttgggggtgtggccagggctggcagttgggcggggccagggctgattgggggtgggttggggcgtggccagggctggcggggtgggcgtggcctggtctgattggggcggggcatgggtaatgccagggctgattcgcaggggccgggaccgagccagggccaactcacctcctgtttgcccttcatccgacacacgtttatgtcgctggggttagatctccaggtcagcttctgcagacagagagagctggtgagggggtaacgggtcccagcagccctgagtgaccccgccgtgctgggccgaatccacccagctccccggcgcagtgccgcgtccccctggccctacccctccactcccacctgcaccccttcctcaccctctggtaccgcagctccgtggacgtggggggctccagctctacgcggtagaggttgtccctgggggaggggcatagttagtgagaactgggggctccgccaccctctcccgttccatccttcccactgccaatgtggtgtgcacacgggggcatgcagggccatgccaatgcctctgacacgagcaactctagcgccgaccacacccccccaagggccccagcaggccttcatatcctgcactccacctcctgcccggcacgccccacggactgcccccaacaccatgtcccatggccttaggtcaggtgccccactcggcgcctcccaggcgcccaccaggctctctcccctcacacccttgccgaggaagccgccctgctcaacgtcattggtgacctcgtgtagttaagcccagtggtcacttccgcatcctcctcatcctctccaaagcatttgatctgtccggtctctctccttcctgggaagcccatccctagaagccccgtaatctcacacttgcttctccccacgacagcttccacctggtccagcctcaatcatagccagcctggacagcccagtcccctccaccctggtcccctggattccattctcgccccctcccagaagcagccaccagagggcgggcgcgtgtgagcacctgagtcaggtccagtccttcccctacctaaaaccctccgtggctcccaccttcctccgggtcaaagcctaagtcctcccaatggcccaacaggccctgcacgacctgctccatcccctccctgccctcgcctcctctctctctccccctcgctcattctgctcgtcacacaggcctccttgctgtccccagcaatacctgtccccaatgaacagcgtcctgttgacccgcaggactcgctggatgttgaggtcgtcagcaccttctgcgggggtcaggcgtccgggcccgctgcccacaaacacgggatagtggttcaggtctgagtgagggggtggagaggggtgtgagcaagggctgggggtgaagagagggtggcctgaggtcatgccccttctaggggtggctcctggactgcttgagtcccccagtgggggcagcagacccaactgggaacccagatactcccacgggactccacccccgcccaaagacacccccagactcacagtccctgggggccacgctaagcggcggcggctcctcaggaaagaggccgtgggcgccccccagtagcagcagcagaagcagcagggccgggcggggaggggacgctcgcggggtctgcatggcgagggccaggcgacaggaggaggtgacgcctgcgggcaaggggcggcgaggtgagcggcctgcagtcccgctcgtggccacaagacggcgggcgagagcagcagacgctccttcaaatcccagaaaaattcctcacggggataataattaataaaaacaataatggcaataataataataatacacagcactgatttaattatcagaacaactttatggccacgtgtgcgtgaaagcccaggaaacgacttcaaacaaaactgcattcggtaatttaaaactaataataattattataataatagatacaaatatcctaaaacatatatttaaaaatgcaatcgcaaaatacatgcataaaaatacttagaattaaaacacaaaaatattaaactcaaaggctaaaaaaaaaaagagtcaaaggctcttggaattttataagccacaagctggctgtgtgtggtggctcacgcctgtaatcccaacattttgggaggccgagatgggaggatcatctgaggtcaggagttcaagaccggcctgcctaacatagcgaaaccctgtctctacaaaaaaatacaaaaattagccaggtatggtggcctgtgcccgtaatccctgctactggagagctgaggcaggagaatcccttgaacccaggaggtggaggttgcagtgagccaagatcgcaccactgcactccagcctgggcaacagagcaagactccatccaaaaaaaaaaaaaaaaagccacaagctgggaatgacagtactacataaccacagaatcacagaatattccccatgccaagggcctctgtgaccctggtagatctgacctccttcccaaatccagccttttcattctccgcttgcacacctccatgacaggcacctcactacctctcacgggggactgcttcccactcccattcaaggtaactttgcagaaacttctaggtgtgtggagtggagacactctcccatccaggtaatgacatagcagcggaattcaccctctgaacccccgccctccatgctgaaggtcccagttcagagcaccccctaccagaaaggggtacagtccaggtcccggagccccgaatgagaagttcagcagcctcgtccttctgggaagtattgggcaagctccgagcccattttcctgtctgagcagcaggggtatcccccagccctgccctggccttctggctcagggattctgagcccccagaggtgaaggtgattcgcgacaatcggccctggggtgcctgccccctccaaaaacaggaagacctcgcatagcgcggctggacttcctcttcacgaccctgagcttccaggatttgtgactcagcgaacacccggattccacgtgtgttcagggcacggccctgtttccttcagaatttccttccctggctcctcccctgctctacagcctcctgtggctcccagggacccctgagtccaggccccagcctctccctgggattcaaggcccctgacctcagaccccacttcggcctaccctcccctcatgccacgggcctttctagccccctaccccagaacctaactaagagccctgtctgccctgtgcctttaaaaaaaaatggctaaaatatatataacataaaagctgtcatcttaaccattttcatttaactattattagtagtattattatttgagacagagtcttgctctgtcgcccaggctggagtgcagtggtgccatctcagctcactgcaacctccccctcccgggttcaagcgattcttctcagcctcccaggtagctgggactccaggtgcatgccaccatgcccggctaaatttttttgtatttttagtacacatggcgtttcaccatgttggtcaaactggttttgaactcctgacctcatgctatccacccacctcggcctcccaaactgctgggattacaggtgtgagccaccatgcccagcctccttcattcttattatttttttgagatggagtctcgctctgtcacccaggctggagtgcagtggcatgatcttggttcacagcaatctctgcctcccaggctcaagcgatcctcccgcctcaacttcccaagtacctgagaccacagccacgtgccaccacgcccagctaatttttgtatttttagtacagatggggtttcaccatgttggccaggctggtctcgaactcctgacctcaggtgatccactcgccttgccctctcaaagtgcgaggattacaggtgtgagccaccacgctcggccaccttttggttttttgacagtcgccatcctaatgggtatgacatgctgtgtctttcatcttgtgttttatcagaataatatttaattctagaaactatttctttaaacattaagagacagggtctggctctgttgcccaggctggagtacggtggcacaatcaccactcactgcagccttgaacttccaggctcaagcaatcctcctacctcaacctcccgagtagctaggaccataggtgtgcaccaccaagcctgacttttttttttgccgggggtgggggacgcaggggaaggtggacagagtctcactctgtcacccaggctgcgatgcagtggtatgatctcggctcactgcaacctccacctcccaggttcaagcaattctcgtgtctcagcctcctgaaaagctgggattacaggtgtgcactgccacgcccggttaatttttgtattaattttgtaaagcactttgtgaggccaaggcaagaggatcacttgagctcaggagtttgagaccagcctgggcaacatagcgagacacgcccccataatctctacagaacataaaaaattaaccaggcatggtggcacgtgcctgtagtcccagctacttgtgaggctgaagcaggatgattgcttgagcccaggagttcaagaatgcaatgagttataattggtccactgtactccagtctgggcgaccgagtgagaccctatctcaaaaaaaataaaattaatttaaattaaaacaacgacaaaaaaacacctagcaaacataaagcacttgctaggtgccaggcattatcataagtacttaaattaactcatttaatcttcacagcacccccaaggggtgagtgctcttttttttttttttttttttttttggagacaagagtcctgctctgtcgcccaggctggagtgcaatggcgtgatctcggctcactgcaacctcagcttcccgggttcaagcaattctcctgtctcagcctcccaagtagctgggatcacaagtgcccgccaccatacccggctaatttttgtatttttagtagggataaggtttca[265 bp omitted]gttcactagcattaagaacatccacataattgtgcacccatcaccaccaccatctccagaactttctcgacttcccaaactgaaattctgtccccatgaaacactcactcctcacccccctccccagcccctggcacctcccatcctactgtctcagtgaacctgatgactctagggacttcctaggagtgggtcacacagtgtttgtccttgcgtgtctggctctctcactgagcgggattgcctcaagatgcatccacactgtgacctgtgtcagggtttccttcccctttttttttttttcttgttttgagacaatatcgctctgtctcccaggctggagtgcagtggcacgatctcagctcactgcaacctccgcctcctgggttcaagcgattctcctttctcagcctcccaggtagctgggactccaggtgcacgccaccacgcccggctaattttttttttgtatttttagtatacatggggtttcaccatgttggtctggctgatcttgaactcctgacctcatgcaatccacacacctcggcctcccaaagtgctgggactacaggtgtgagcctccatgcccagcctccttcattcttattatttttttgagatggagtctcgctctgtcacccaggctggagtgcagtggcatgatcttggttcaccgcaatctctgcctcccgggttcaagtgatcctcccgcctcaacttcccaagtacctgacaccacagccacgtgccaccacgcccagctaatttttgtatttttagtacagacggggtgtcacaatgttggccaggctggtctcgaactcctgacctcaggtgatccacccgccgtggcctcccaaagtgtgaggattacaggtgtgagccaccatgcccggccaccttccagttttttgacatacccatcctaatgggtatgacatggtgtgtctttcatcttgtgttttatcagaataatatttaattctatttctttacacttttttttttttttttttgagacagggtctcactctgttgcccaggctggagtgcagtggtgtgatctcggctcactgaaagctccgcctcccgggttctcgccattctcctgcctcagcctaccgagtagctgggactacaggtgcccaccaccaaaaattagcacccggctaatttttgttgtattttttagtagagagagggtttcaccatgttagccaggatggtctcaatctcctgacctcgtgatccgcccgcctaggcctcccaaagtgctgggattacaggcatgagccactgcccccggccaatttttgtatttttagtagg[142 bp omitted]gttcactagcattaagaacatccacataattgtgcacccatcaccaccaccatctccagaactttctcagcttcccaaactgaaattctgtccccatgaaacactcactcctcacccccctccccagcccctggcacctcccatcctactgtctgggtgaacctgatgactctagggacttcctaggagtgggtcacacagtggtttgtccttgcgtgtctggctctctcactgagcgggattgcctcaagatgcatccacactgtgacctgtgtcagggtttccttccctttttttttttttctttttttgagacagtctcgatctgtctcccaggctggagtgcagtggcacgatctcagctcactgcaacctctgcctcctgggttcaagcgattctcctttctcagcctcccaggtagctgggactccaggtgcacgccaccacgcccggctaattttttttttttgtatttttagtatacatggggtttcaccatgttggtcaggctggtcttgaactcctgacctcatgcaatccacccaccttgacctccccaagtgctgggattacagatgttagctaccatgcccagcctccttcattcttattatttttttgagatggagtctcgctctgtcacccaggctggagtgcagtggcatgatcttggttcaccgcaatctccgcctcctgggttcaagcgatcttcccgcctcagcctcccgagtacctgggaccacaggcgggtgccaccatgcctggctaatttttgtaattttagtacagacagagattcaccatattgcccaggcgggtctcgaactcctgacctcaggtgatccacccaccttggcctcccaaagtgcgaagattacaggtgtgagccaccacacccggctatcttccagttttttgacagtagccatcctaattggtgtaatatggtctgtctttcatcttgtggtttgtttttttttttgagacggagtctcgctctgtcacgcaggctagagtgcagtggcacgatctcggctcactgcaagctccgcctcccgggttcacgccattctcctgcctcagcctccccagtagctgggactacaggctcccgccaccaccacgcccagctaattttttggattttttagtagagacggggtttcaccatgttagccaggatggtctctatctcctgacctcatgatccgcccacctcagcctcccaaagtgcttggattacaggtgtgagccacagcacccggcctcatcttgagttttatcagaacaatatttaactctagaaactatttctttaaacattgttttaagagacagggtctggctctgttgcccaggctggagtacagtggcacaatcaccactcactgcagccttgaacttccggactcaagcaatcctcctgcctcagcctctcgagtagctgggaccataggtgtgcaccaccatgcctgggtttttttttttttttttgggcaggggggagggagccggggaggggggaaaagattctcactctgtggcccaggctggagtgcagtggctcactaccggctcactacaacctccacctcccaggttcaagcgattctcgtgtttcagcctcctgagaagctgggattacaggagtgcactgccacgcccggttaatttttgtattaattttgtaaaacactttgggaggccaaagcaagaggactgcttgagctcaagagtttgagaccagcctgggcaacatagtgagacaccccctcacaattcctacaggaaataaaaaattaaccaggcgtggtggcacatgcctctagtctcagttacttgtgaggctgaagcaggatgatggcttgagcccaagagttcaggaatgcaatgagttatgattggtccactgtactccagtctgggcaa[137 bp omitted]ggtgaaaccccgtctctactaaaaacacacaaaaaaattagctgggcgtggtggcaggtgcctatagtcctagctactcgggaggctgaggcaggagaatggcattaacccgagaggcagagcttgcagtgagccgagatcgcgccactgcaccccatcctgggtgacacagcgagactctgtctcaaaaaaacaacaacaacaaaacacctagcaaacacaaagcacttgctaggtgccaggcattgtcataagtacttaaattaactcatttaatcttcacaacacccccaaggggtgagtgctctttttttttttttttttttttttggagacaagagtcctgctcttcgcccaggctggagtgcaatggcgtgatctcggctcactgcaacctcagcttcccgggttcaagcaattctcctgcctcagcctcccgagtagctgggattacaggcatgtaccaccacacccagctaatttttgtatttttagtagagatggggtttcaccatgttgcctag[139 bp omitted]agaaaggtaaagtcatttgcccgaagtcagggatcagcggagcccacagatcctgctccattttacttattttgataataacacacaactgaaccccaaatgtttactgcggggagtccaggccacttcacaacgaaccccatctacttagcttcagtttaccccctcgatctggggttacccgacgcctgtgcgcctccccctatccccaagaccatctgcttctctccgtgaaactcgaggagcctctgccagcagccgctcggcgcctgcctgctcagaagcggccccaacacctgccacgctgcggctgccggacacctggtcacagggagccacggggctggcgggtgcgccccgtggcgtgcggggttctccggggcacccgtgcacccacatgtctgcgtgccccaggggttggggggctcctgcctgcaaccctggggacttgcatgtactctgtgggggcgccttgttgggggagaggggccacaaagcaacagctccctccaggaggcccccagctgtcactccagctctgcaaacatgagcccactgtgcagatgtggaaactgaagctcaggaatggaaacgtcctcggggaccccctagtttagctcttcttcctgggagctctgtcctctggcgacccccatgccccacactcgccagcctcactcccagctttctgtcccgccttgcacccccctcaaccgccagctctccgtctctcttttccctcgactcacgcccctcttgggcggccttgtacgctcctgggtcccgaaaccccgtctatatccgatgacacccaccgtcctgactgtagccaggcctcccccagctccggattcggggttcaacttcccctcagccgctccaggcacggggctcatgaagtctcaccctcagccatacggggcacgaccccagaaccgcgccgccctagctactgtcaccccgtcatgggcctgaatttcctgggggaactctcccccaaccttctctcctccaggccagcgcgtctgggctgttcttggcccctgaggcttcggtgtaagttttaggatccggttgtgagttccaagacaaacaacagataaaacaaaaaccctaatggggttctcgctggagtggcactgaggctaccgatccaatcggggtcaacggatggtcgatgtcccccgacccggccccacttctgcgtcctccgtctcagctgatggcttaggacacaactggagctcatcctgacttccccgccacaccccattccaccagcctcacagccagcattagccactcctgcggcctctgccttcgagtttacgcagaactctcaccgcttcccgtccatgccgtggccactcacatccccgcctgcctggcccagctcagcccagcccagtcccctccgccctgatccccaggctgtccttcccgaaacagccaccagaggacgcctctgagcacatgagtcaggtcccgtctctcctctgcccttacccctccatggctcccacctgcctcggggtcaaagccggggtcttccctgcagcccacaaggccctgtacaacctgccccatgccctgtctaccctctcctcctccctctctcccactcatcacttggctccagccacaagggcctccttgctgttcctccaacaggccaggcatggtcctgccctagggccttaccccaggctgtgccctctgctttgggagttcccccagatacacacgcaactcacttcctcacttcaggtcatctaagagaggctccccttggaccttcctggaacccagacgcctctgccctccccactttatgccctcctctcctcccccatcacacgcaggcccgtgtgctgctgggagtgtgggtctgggaacagctgtgtgggcaccactgtcagaaatgcagaatcccaggaccaggcccgctcacccaggcctgcacctgatcaagatcctgcagggatccacgtgcatcacaaactctgagaggtg[139 bp omitted]atagaaataccccatctctacaaaaaatgcaaaaattagctgggcgtggtgatgtgtgcctgtggtcccagctacttgggaggctgaggtgggaggatcgcttgagcccaggaggtggaggccgcagtgagctgcgattgccccactgcactctgagtgacacggcaaggccctgtctcaaataaaataaaattaaaataattgcttgttggggccgggcatggtgactcacgcctgtaatcccagcactttggaaggctgaggtgggtggatcacctggggtcgggagttcaagaccaacctggccaacatgatgaaaccccttctctactaaaaataaaaatattagccaggcgtggtggtgcatgcctgtaatcccaggctactcgggagactgaggcaggagaatcacttgaacccaggaggcggaggttgcagtgagcagagattgcgccattgcctgggcaacagagtgagactctgtcaaaaaaaaaaaaaaaaaaaccccagtgaaccaggggcaccatcgacaagccatcctgccccgccctgctcagcccaatctcactggctggttggggaaactgaggcccggacagaaaacatcggcagctgaagaagtcccagaagaagagctttggctccagaactgcacagcccaggttcaaaccccggctctgcctcagctgtttgaccgcagacagtcacttcccttctccaggcttcagtttccccatctctgtacactgtgggtgatttaaaattcaaccctaaagcacctccatgaggaagaaagaatgtaatctgaaccaatgtgcggcaggtgaaatatgtttttttctacatttttttgtttcctgatagctggtctgtagctaaaattcttttttttttttgagatggagtctcactctttttgtccaggctggagtgcagtggtgcgatcttgactcactgcaacctccacctcccgggttcaagcgattctcctgcctcagcctcccaagtagctgggactacaggcacccgccaccatgactggctaaattttttcgtctttttaatagagagaaagtttcaccatgtttggccagtctggtcttgaacttctgacctcaggtgatccgcctgcctcagcctcccaaagtgttgggatgacaggcgtgagccaccgtgcctggccctttttttttttttttcttttttgcctgagcagggaagttttactttcaatctaccttgaatccttcttacttccagaagctggcttggtccctggctctgtcccaggggtaattcctagcctgggtattgagctgtccttcaagggcaatgcccactctcctctctgaccccggcaccaccaacaagccatccctttactgcatatcccaagctcagctctgaccctgccactcccctgctcaaaggcctaccatggctccccagtgccccacagaagaagaaccaattttgtttgtttgtttgttttgagatggagtctcactctgtcgcccaggctggagtgcagtggcacgatcttggctcactgcaagctccgccttctgggttcacgccaatctcctgcctc[200 bp omitted]caaggacacctcccaccctgggaataacttgaagcttcttcttgccctcacctactatcaggcatttccagcccctccctgcagaccttggctcaggctgtcccctctgctggggaacctttttagcctcctcaaggtccagctgccctcccaaccagccagacatagtaacctcacgctctgtcctccaagccctacagctgactcctgcttaccagtcaaggccatgcatgcgtgtccccgactccaggaagccttctctgactgccctggctgggcctcagtttccctgggttcccccagccacaactaccctgccctcatcttcgctcaaccgccaacttggaagcaactgcatccagctctggcgccctgtaccccaaattggaagtcacttacttactcattggattaataattatttggcaccagctgtataccagacacatgtgttcaggcatggggacacagctgtgaccgagacagctacaaagccctacccttatggggctcccagtcccgtggggagacgggggtacactacacacgttaaccaatatcggaactcgatagcttctgacaataataagcacgaccataaaaacatgaggaatgattagaggaggggacatttgagctgaggcctgaaggtcgaaggggagacctcgtgacaaggtgaggaaggtgctccaaggggaaggaactgcagaggaaaaagcgtggagactgagaccactagaggaagagacagaaggtcaaggtggatggggaggctggcacagcacagaaaggactcctggggctctccccttcactcagacacgacactcagcctcatttcttgtttgtttctaaggacagggtcttgctctgttgcccaggctgagtacagtggtgccgtcatagctcactgcagtctcaacctcccaggtttaagcaatcctcctgtctcagcctccccagtaagctgggatcataggtgtgcatcaccatgcccagctcatttttgtactttttgtagagacggggtttcgctatgttgcccaggctggtcttgaactcttggcctcaagtgatcctgccacctcggcctcccaaactgctgggagtacaggcatgagccaccgtgccctgcccgcatctttttttttgctgttgtccataaaataaagacactagctcagggcctggcacacaggcattcactttaggttaaatgaccttactgtgtgaccttaggccagctacacgccctctctgggcctctctgttccaagatgacagtgatcccaggcaggcttgaagcctccgtttctccatctgccacagcacaagggacgagggcgggatgtctgcctccagttccatacaaggagctccctatcgtccgggccgccccaggattctggctccggggccagcatccctcgggggatcgagtaacctggtcccggcagccgggccccagggccgtccaggtctggttacgggctctgcttacagctgcccctccagctgcctcggtcgcccccatcacagcccagccaggctctggggctgtctaggaacttggcaggaaggctggagggagtccctggggcccaggcatgaggggtggggcagaagagagaggcccccgtgtcccccatcctactggatgtcggttaactcatccctgcccagcctgggaggcggcctatgagcctcccctccactttttttttttttttttttttctgaagcagtctcgctggtgttgcccaggctagagtgcagtggcataatctaggcgcactgcaacctccaccttccgggttcaagcgattctcctgcctcagccttctgagtagctggaattacaggtgcatgccaccacacctggctaatttttgtatttttagtacagttggggtttcaccatgatggccaggctggtcttgaactcctgacctcaggtgatccgcccaagtcggcctcctaaggtgctgggattacaggtg[134 bp omitted]agctccgcctcccgggttcacgccattctcctgcctca[175 bp omitted]cccggcctcccctccactcttgaccttccctcctgagtcctcagttctcagagcctcagtttccccatcagcgaaccaagcatgataaccatccacatcggcttctcatgaggggtaaatgagcaacccatgataggtgcttagttaactgtcgtgactgctgtgttgccttgggttagaaccctcccatctctgagcttgtttcctcctgtgaaagatgaggataaaaatattggctccacaagggcaggggtctgtctcagttactgctgtgactccagtgcccagcatggggcctggcacacagtaggtgctcaacaaatcagctgaacgaatgtcccagcaagagcccccacttataaaatagttccaaggaggctgggcgaggtggctcacatctgtgatcccagtactttgggagactgaggcaggaggatctcttgaggccagttcaagaccagacggggcaacacagccagaccccatctctaaaaaataataataataataattagctgagtgtggtgcgacatgctacttgggaggctgaggtgggaggatcactagggcccaggaggtcaaggctacagtgagctgtgacggcctcgctgcactccagctggacgacagagtgagagccctgacttaaataatactactaatgataataataataataatttaaaaataaaatagctggccaggcgcggtatctcacgcctgtaatcccgacactgggaggccgaggcgggcagatcacctgaggtcaggagttcgagaccagcctggccaacatggtggaccccccgtctctactaaaaatacaaaaattagccgggcgtggtggtgggcgcctgtaatcccagctgcttgggaggctgaggcaggagaatcgcttgaacctgggaggcggaggatacagtgagctgagattgcaccattgcactccagcctgggtgacagtaagactccgtctcaaataaataaataaattaattaaaatagttgcaaggatatgttcattccagacttcttaaacacctactgtgcaccaatatggctggagactcagccatgctcagggttgtgcatgtccagggcttggcacagagccctgcatgcaggaagcactcaattaatgccgagtgtctcttttgcaaaggatgggactctaccctgagccgccttccacattcaactcacagcaggccaggagagaaggaattcaagatcagatttaggaagactgcacctactatgcgccatgcttttcccacatatgaacttatttcttgccggcatcaaccctcagagaccagcaccctcatctctgtttgcagatggaaaaactgaagctcagagaggttaagccattttgctgaggtcacatagcacataagggtgccatggatgcaaacgtgatcttgcttcttgctgacatttttttttttttgagacagggtctctgtcacccaggctggagtgcagtggcgtgatctcagctcactgcaacctcgacctcccaggctcacccgatcctcctgcctcaaccttctgagtagctgggactacaggtgtgcaccaccacacccagctaattttttgtattttttgtagggggtatgatacccaggctggtcttgaacttttgggctcaaacaattctcctgagtcagcctcccaaagtgttgggattaaaggcgtgagccactgtgtgaggccgcctcttgctgacattttccaagtgctcacaatgtgctacctgcccgtgatgatggcacaccctaaatttttttttttttttttgcgacagagtcttgctctgtcacccaggctagagtgcagtggcacagtctaggttcactgcaacctcctcctctcaggttcaagcgattctcctgccacaggctcccaagtagctgggattacaggcacgtgccaccttgcctggctaatttttgtatttttagtagagacagggtttcaccatgttggtcaggctggtctcgaactcctgatctctagtgatccacccgcctcagcctctcaaagtgttagattacaggcgtgagccaccgcatctggccagctgaaatatttcacagataagcaagcagagacccagagagaggctgtccctgtccccaggccactcgggaagccagggtgtgggagcccaggcagaacctccagtggggacgtggatgcatctctggggctcctggggctcctcccctccggggagggggcccccaggtaattaattttaatcactgttttgaaattgggccaccaggaggcaagtcggaaacagcaacttgtaattaggaatgggtggggcggtggggggggttgcaacgaccattcagaggaaattaaagtgtcatttatacccagcaggtaattaagggacccaggagggggtggctcgagggggctggggctccaagggaatccaggctggggctggggcgtcgagcacccacagattccaaagcaggtttggggacggacaggtcctcccttcagacccaatttggaggaagtacagaggggtgggtcgtgagcttgggacccagttgtggagttcagaggagaataaggttctgttatagggactccacttagggaggaagaaagatggcccggcctttgggggcttgatctaggggcagaaaatgaggagcccttcccctccaagttggggttctgggtgcccttccccgcactgctgaactcctcccccagaattcctccagtctctgcccctcccaagaggctggggatccccaggtggccgggaccagtgtgagaggcctggagggggccccgctgagagaggtggtggggaatgggggtggaggtctcagggagtgccaagtgctgctgggaacggaagacctggcgaatgaacttgaagaagacaaaggcgggaaataggtcccaggggaaaggccccggggtcagagcggaccacaagtcctggtgagtcagggctcaggaatgatggaggggctggcagagtgacgtgggtgctgggggatggggcttgagaaccgtcagactgtggagaacagtgttcgaggggaaggggcccccagtttgctgggtcatctcagggaggctgtcatccccatctgtgcctcactgctccccagagcctgaggctccgaccttcaaagagggacaacagcaaacacttacagggtgcctaccccgtgttcccagccctgtccctcactgagcccagcggggtaggtcacaggggctcttctgaccattccataggtgggaaaactcggggccagggtgggcaagggatggggccaaggtcgcacagcccagaaatggccaagctgggatctgaacccgggcccaggagtccagacgctgcgctgttaaccacagcactgccctgcccccagagaaaggggctttcagcctcttcacatccatctcagcaagttttgtgggtgactccaaaaatctgtcccctatccatccactttgcccccctctattacccttgcctggccggcccccatcaattattaccaggacctggtcctcaattccagcctcgcccccgtctgtcttccccaaagctgccaccagagggcaccaagagtcaggtcctgtccctcctcttcccgcagccctccatggctcccacctccctgggggtcgaagctcaaatcctcactgcagcccacgaggccctgcatgactggccccgtactctccttgcccttccctcctcccactctcccctccacactctgctgcagccatacgggcctacttggtgttcctccaacacgccaggtgaggtcctgccccagggcctttgcacgggccgtgccctctgcctgaagtgctgcttcccaagatctctgcatgaccagctccttctcatcttccaggtctcagctcaaatgtcatctcctcagagacaccctccccgacagcctcagtgaacacagccccgcccttctcagccacttgcaagataactgtcttcagggcactgactatacctgatttaccttgccctttctctagttagtgtctgtgctcccctgtccccccacccagctgggaattcgacaagggcaggatgcagtagtctatgccttggtcattgctgggtccgcggcacctggcacttaataggtgctcactaaacatcagtccacttgttaaatgcaagcaatgctcccacagctccaaatgagatcatggccagaagctccacgtttctgctttgcaaggttgttccttttcttggagtcagaaacccaacagaactatatgtggcattttgcctgcaacctcttgtttaaatggtcaaccctaagggaggcagaacagcaacccctgttttacccatggggaaactgaggctcagagagggggcatgagtgagtgagagaaaaaactgattcaatctcaagtcagtctgatccaaatgctacggctgcctatgagggcgataattcagaatggctacttcagcttccccaggggctctgagtccatggccttcaggggagggaggttcttctgcaatcatcagaaaacatatggctgccccctagtgaactcctaaacatccatcatggccctagctacagtgccccttcctggtacatcttccctgatccatgaggcagggtacagctttccctagccccagttgctccctctgccctagccctgaacctgtgtagcacgggtggccagtgcctgcccctgtttctcttcctctggcctggaagcccctccaactagacagaggagttaaagttacctctctgggatcctagcatcacccagcacaggacacagcacatggggaccactggcagcatttgttgactgactgagggacctaattgcctggaaccaggcccacctgggaacccacaatcctcctctgggttcctgtatttgggaagctccctcctaggtccgcccttggaaggctggcttagctgggccatggtgcatcctgggaaatgtagtctagagtgggccttgcctcccagtggggccctggggtggccagctttggaccctggggccagatagagaaggagcattgagggtggcaagtagtagggccccatgtccctgccaaagagtcctaagggtggtccccagcctcccaagtctcttactttttctttttcctttttttttttttgacggggtcttgctccgtcccccaggctggagtgtagtggcgtgatctcagctccttgcaacctctgcctgctgggttcaagcgattctcctgcctcagcctcctgagtagctgggattacaggcgtgagccaccacgcccagctaatttttgtatttttagtagagacggggtttcgccatgttggccaggctggtcttgaactcctggccttaagtgatcctcccgcctcggtctcccaaagtgctgggatcacaggcgtgagccaccgccactgtcttacttgtcctaatgtctgccacttcacctggatgtccctggaggagaggtgatgaaggaccgtgataacgaaaaaggattgcgtgcctgggttcctatggtcacacacccgaccccagcaccaccatgcatgatggtgagggtgtctagggtgaagggtctgttttgggataattcagccaaaggacatggggccggtggctggggcctgaatcctgggctgctttgagccttagtttccctactgctgctacatgaagacagggagggaagaaatgcacgaccatggccaagagaaagccacagcccaaccaaatcacggctgggttttggaggagtcacagtatgagagcccacaaccccttaaatacctgagactctcagaacctgctatctcaaacacgacagcagttcagaaaacccacagtacctggaaattgaaaaaaaaaaatccaggagatcacttggggctgaccaatatcaggattatttatccaggattctgcaaagacagccgtccaacccctctggcctgcctcccacgaggggcggctcaccactccttccagcaatgcatttggtttccaaggagcctgtctcctcgtagctacccttcctcaagatctgaaatgtgactcatgcccctccccctgctctataaccttccatggctccccattgcccttgggataaagtttgctccttggcttggcattcaaggctactgcctacctcatggtcctcttaaatagtctagccactcagggctcctccaacataccccactgtgatgatccttgctgttccctctgcctgcaatgcctgtccccctctcctccaggcagaatccttctccttcaagcccagtcccagtactccctcctccaggcagctttccctgctcccacctgtcctgaccactgccctggaagtttctccctccagcatctccctttccgggcccacaggacagggccacgcccagggtcagctcgggacaccttccttcccaggagacgggcggtgaccagcaacatccttcagtccccagggatccagctcacctgtcctgcaggctgacgtcatggtcacctttccaagggcagtttgatttctatcttccaggcccagtcctggtaaccccagcaaactccggctgccagcctggtgtggccactgcagaggacatgccacatctccagccccttctatgcccatcggtcagaggcgaggactgaggtctcagggggaaaggcccctcctggggggactggatacctaggcttggagacaactcacttcaaagcagagaaggtgacacagaccctaagatcctgtgggggctcagccccagccgagtctggtgggggaaccagaggcaaaatggggcaggcacagatcaagacagtctcaagcgacccctctctgcctcacctcccccaactccagtccaaaaccaaagcgcatctcctggggagactgaagcccagaaaggactagggaccagcctgaggccacacagctaagcgcctcctctcaaagctcctgcatagcccagagtcaaggggaagaagggaggagcagagcttcagggcaacccttaggaggagctgggatgcaggagagctcttgggtttcaacggcttcctcgggcctcagtttccccacctgctgttgggatgggccggttcagaacagacaagaggctgacgccaggctgccacctacccaatatccgaggcgtctctgtgtgggtggcagtgactcccagacaacttcccggagagtttaagaccccctcccaggtgagttccaactcagccttggccccagccgttccccaccacccaccccacaacctgtgctctccctatgtagagtttaaagcaattgttcaggtacatcctgaagtcccgcgcctgaaagaaactggtctcccgggatgtgggaaagggtttgggggcaagggggatgccccaggggtcctgaatttttattttggagagggaatttggaccttctcacaagctgaaggaacacagaaaaacagaaatgcaattttacaaatggggcaggggcccccttcagtcaccatagccatgagtccctctctccctcctccctccttaaacccaaacccagaaccccaaagcctcagagcaccccagtaactccaagtccccgttccgctccagtctaggggtcaaagatgacagcctcaggtagaggatgtcaaagacctcagcgagagagagagggccacatggcggcgggggtgagggtctgcgaatccctcccccaaccccaggactcttgcaaacgctcctagctccagcattaacccggccggggcagaggtgggggttcatgacagtagcgccccctctgggagatgccccaaactcggagagcgcccagaggcggagagcaggagaggagggcacgtgacccccaccccggggaccaatcagcgcccgcgggagggggccacactcggcgccccccacccatcccggcgcgcttggagatagacgttttctttgtccttttgtcagctcttgggggcccccgaacccccaggcccccactgcagcgggggggatccggaccggccggccctcccctccaacaccactgcgacccctgccccgcggcctggacccgcgactcgtcctgttctgggctggacaggaggccggagaggactcgggcgcccaaggtgcggcggccggacgcgaagtggggcggaggggcctcccagtgccaggacccccacaccagccccgggtcgcctcgacttggctctcaggaccccgccccccaacgccacccccaacccccgaccaacaggccccctgcctgccccgaaccccccacctgggccccaatccagctccccagcggcgcagccgcgagcctcattattgtgtcttctccgggcccccccaggacaaaatctccacccgctgcggtgccgacagaacccccaacctagctgcacatacaggcccccagtcaacaatccaagcgccccccccacgttgcggtgccattagacacccccataatggaggctcagggagcgccccaggccaaaatccagcccctccaaagcgatgccaccggacccccaccggatccctccatacggccagcgaccccctctccaatccggtcccctccccagttgtgtggctgagagattccccccctcgttctagcgctccccaaaccccctccctggctccaaatccgtcccctcccagtggcagggcccgcaggccccccagtcctagcgcctgacctggccaccccagccagcctttcggtccccccagctgcgtgccgacagacgcccccatccccgcgcctcccccaaccccctccgcagacgccccggggcgcttacctcggagccgcggccgccgcgagtgcgcgggcgggaggcgcgagggcgggagggcgcgggctgggggggtccgtgcgcgcacctgtcccggccgggccgctcagcccggcatccccggctggggaggggggctgggggcgcgcgctctccccgcccccgggcccacggcgctgcgctgggggagggggctcagccccggccccccgcgcgctggcgtcggctccggggggggcgctgcgcggcggccggaccgggggcgcgccgcggccgcatctcctccgcccgccgcggccgccgctgcgactcgcggctctgccacctccgccccccctttccagcaaccccccacctccccaaagccgggctggagccgcgcaaaacccggcccggagcaaccgcggcgcggagcggagggcggagccggtgggtggcgtttgggtgagttgtgggggaggcccaagggggtcaccctgctttggtccaggtggtggacttattaattgagccgccccaacttcctctcctggtcccctctgttcaaactcgcatccccaggatccagccccaatcacacccagcccatggggtcaatgaggctgtcaggaaccctacggtctgggtggcccccttcatagacgagatcatttcttcaatccacaagtattccatttagcaacattcactcgacacttcaggaaactgaggcacagggaggtcttgtccaaggtcacccagttagagagcgtcagggggttttcgacctgagcaaaccggctgcagagatctccatggttcacgactcccggacctgcccctctgtcgccagcgccctgtgggacgtggcccagaaaggagtttttcgaggactgcaggttcccccatgaatttgagaccccaggacagagcctagaggtttcagagaccttcctgtaaccctcctgacccttcgaatgaattcaggacagcaggggctgctctccatgcctcagtgcccctccctgtccaaagtacctccccatgtggatgtgatcctgtacgtctcccccactggactgagtgctgtcctggtcgctctggcctctctccatacagtagatgctctgtaaacacttattttttcttgtcttttctgtttttcttatctttttctttctttctttgagatggagtcttgctctgtcacccaggctacagtgcagtggcatgatcttgactcagtgcagcctccgcctcccgggttcaagcagttctcctgcctcagcctcctaagtagctgggattacaggcaactgccaccatgcctggctaatttttgtatttttagtagagatgggct[136 bp omitted]taatagagaaatgggggagagagaggatagatgatttttttaaaaattgttattattatttgtagagaccggggcttgctacattgcccaggctggtcttgaactactggcctcaagcgatcctcccaccttggcctcccaaagtgctgggattataggcatgagccactgagaccagccaacactttgttgttatgtagcttgtgacttttcttgcacacttactgagtgctggggccactatgccccatccctggctccgtgccatccagggggtccagacaggttgtgcactggcttccagcagccactcagtggggactgggtatcaggacttgaaccccgctccccaggccacccacggcaatctgcaggctccctggcacccatggagacagcccaggtcttccagttcctgggcatgttcccagggccatcctggtgaccacaaacctccgggagcagccaggccttcctgcccgtggttttgcccttcccgccttccggccgccccagcatcccaggcaaatcagccaaggcacctgctggtgtccagcccccaccccgccccgtgtcctgcccgctgggggccactgaggcctgctccacaagggagggggccgagccccagctccaaggcttggggtctagaatctgcgtcctcccacctacactcccttccctgcgctgtgcccagcccctggcatcccctccctcccctgccttcttggctgtgcccagctgggtacttctgcaccctagtcattcagcaaacatttattgagcacctactgtgtaccagatactggactgagctgtcaacaagacaaatctgccctgtgccttttgtctagcctggggatacagaaaccagtgggcacagaactgcaggctgagacagactggctggaggtccaggaggacctcgaggaggtggcatggaggccttagagggaccatagatccaagcaggggggtgggggtaggggtgtgcggggagggcgttctaggcagagagacctcggggacaaaggccttgagggaggccccacccccaccggtggctcagctgccacccaggcttctgcgaccatgaatgggtctttcatgtcctggaccggggcaaggtcaggccgggcctctccctcctcccgcccagggctcctggctgtctgagccctgacctggaggacagtggcaggatgggccagggaggcccagggaggggcagggcatcgcccgaggtcaccagagccagcagcgccctcccagccgtgggattctgagcaaagccccgccccgctgggcctcagtttccccggcctgggcgggcgcgttggcagcgcagcgctcccgtcctgctccgaccgggtggattccagtgcgggttttgcgggcgcccgcggccaccgacaccttcttcccagtgcggcccgggctgcggccccgggtccgaggaggcccggggagacccggaggaggtcagaaggccttcagggtccccgggatggggtgaggctgagctcggccccttactgccggcgcctgccaggaagggaagccccgccccaatgcctgcgcgcccccatcaggaccactagcctcgtcgccccgctgtgtgactcccgggggtccctggccctctctgggccgagctgtagtcaggctcacgggcagccgctcagagaggtcgcctgggtcccatcccttccccaaatggccccccgcctcagtttccccggccaggtgcaggctctctttaaccccaggttggggggtcctcgctgctaggttgcaccccgggtctccgctcaggccagggaatcccctgggggctccgaacgggcagctccgattggctggggccacgtgtgacgtcagagcctccccaacgccccctcccctagaggcaagtgggggcggtcgcggccggggaggggtcccgggtccgagcggattcggggtgtccccccagctcaagtcggcagctgggccgcgcagacgcgattctcctcggacagatttttccctcgtcccaaatccccctccggccccccccagaacggcagctgctcaggcggcagatgcgccggctaaatccgcccagctggtcctccgcggagctaaccgcctggagccccggggctgggggagtgctggccgcatggtcctgacccttcctcgctccctgttctttgacccctgactcttcgcggaaaggggccgggattctgttgaggacactttctcaacctccagttccctcctggagctgctgagaggatttgggggagtctggcgcccagagagggtggagccctttccaaaaaccacacagcatccctgggcgtgctgtccaaaatatgccctgtattgcgcatatattaataattatgatgatgacttaacatattaggcctctgctatatgcacccccacgattctaggactattatgctattactccattttcaaaggtggaaactgagacccagagagccgtgacttgactgatcccacagccaggaaatggtggagcctggatttgaaccccagcttttaagaagaaggtgccactgtcctggaagaactctcaggacagcattagtgtctcagggatccccctaatcggaggggccttaaggcaagtgagtgtgacctggggtgagtgagtggggtctcttagacctcttccctgccccctgcctggtgcccctgagcctgacacagactgcctccctgccttgctttttcagcctaatcatgattgtcactgaagatccaggagggcttcctggaggaggaggcagctccattctgaaatgccaagggtacagctttattgggacagccagtgtctctgaatatgtaggttttgcacagagcttgtactgccccagggcctgtacactgcctgtcccctctgccttgtgcactctttccctagatgtccaaatggctcctttcctcacctaccccaaatctcaattccagtgtttccccagcctcccctcatttcagtaatcactctgcagtgagctaggattgcgccactgcactccagcttggataagagaacaagaccctgtctcttaactaaatacataaataaaaataattcccctcttcatccctctttaccctgttttgatggttttgttcaacttttcaccaataggactttctcttatgcatttactcgtttctcttccaatccctccccaagacagtcaagttcccaagtctgtccaggactccactgtgtcacgaggcttaaaacagagccaagcacacagtaagcactcaacacatgtggtgaatgaatgaacgaatgaaggagtgaatgagtgggagtctgagatttcaacagggcttgccttcattgtatcaaaggggaaactgaggcccattgatcagagagtgagaccagagtcacttatttttctctttagcaaaataggacataatggtgaccacctccccagtatgcagcaggggtatccagggaaataataatgtcggaagcacttattaagcacctactgtgtgcactgcacagctccaggtgctttgcgcatttcgaatggagacaaggactccaacccagaacccaggacgcctggtcccatggtcagcctgagttccctacacctcactgcttccctctcattgagagaggggttatatatgcaagctccgggtgcacaggagaccttcagccagggaggcagtggtccccactgtgtctgaggccccctctgcagccccgcagaccctgggcccgaggttcaggctgtgtgtctggctggagctaacagcaccatgcctgcacgcaggaaacattaaattagagacggaagcagcaggacctgcgcctgatttataaattgaaattagagcaattacaaggcttcctccttctcagaaactgagaaatcccccagaaaggcccatgtgtgtcctgggttggcccagaaccccctcccccaaggcatcatctgcatatgatgtagtgacaaatgaggcagtggcatcctggtctccaaaacaaggaatttgtgggtggagcgagggtgtccagggaccttcaacctccctggggtctgtccttgggtatagataggaaactgaggcatgggaggtgagtgtcatttgggcaggggcaggtgtcacattctccgctttcaaaatctcccctctggcctggtgcggtggctcatgcctgtaatcctagcactttgggaggccaaggagggcggattgcccgagctcaggaattcgagaccagccagggtaacagcaaaagctcatctctactaaaaacacaaaaaatcagccgggtgtggtggtgcatgcctgtaattccaactactcgggaggctgaggcaagagaatcccttgaacccgggagacggaggtttcagtgagccgagatgatcgtgccactgcactccagcctgggaaacaaagcaagactctatctcaaaaaataaaaaaataaaaaataaatctcccttcccctagatctcccttcccctaggcttcccattccagcctagtgagcacacccagctcactcctgcctcggggccttggcacttgctgttcccactgcctggaagctgttccccaccaacgttcccttctctgagaggccttccctgatcatcccaagttggagaggatggctcttttccacccactgttttcttttctctaaaatcagtgatgggatagtgagctgcctgtcaagagaggcaagcaagcagacagtggagtggatgtgatctctgcagctcacacactggcgtccatcccctagctttaccactcaccagctgtgaacaagttgtttaacatgagaacattccaaaagatgccggggcctaggacggacgccatggctcatgcctgtaatcccagcactttgggaggctgaggtgggtggatcgcctgaggtcaggagtttgagaccagcctggccaacatggtgaaaccctgtctctactaaaaaatatataaaaattagctggacgtggtggtgcgtgcctgtaatcccatctacttgggaggctgaggcacgagaatggcttgaacctgggaggcagatgttgcactgagccgagatcatgccgctgtactccagcctgggcgatagagcgagactctgtccccccattaaaaaaaaaaaatgctggagcctgtcacatagttggtgcttaataaagataagtagtcttctccatgggaggtcctgagattcttgtttcttcctcttggtgatttttcctaatcttcctcctctcttggaagctgtgggaaggagctttgatgccgttacatttgcgtagggcattgtcaaaagagaaataaaaacagatgaccagaacagatcctggcacccgtgttcacagcagcaaaagggcagaagcaaaccgactgccaatgagcagatacatggatcaacataagggggtccatggacacggtgaaatatgactcagccatcacaggcttcagatgtggatgcatcttgaggacgtcagactcagtgaagtaagccagacgcagaaggccaaatccagtgtggttccactcctagaaggtccctggagtcatcagattcatagagacagaaagtagatggggagtgccagggactggggagtgggtggggagtgagtgtttcttggggacagtttcagattgggaaaaggagaaagttccggagaggatggcggtgatggttgcacaaccacgtgaatgtgcttaatgccgctgaactgtgcacttagaaattgttaaaatgctgatttttctgtgatgtgtgttttaccacattttttctttcttcttttttgagacggagtctcgctctgtcccccaggctggagtgcagtggcacgatctcggctcactgcaaactccgcctcccgggttcacgccattctcctgcctcagtctcctgagtagctgggactacaggcgcccgccactgcgcctggctaattttttgtatttttagtggagacagggtttcaccgtgttagccaggatagtctcgatctcttgacctcgtgatccgcccccctcagcctcccaaagtgctgggattacaggagtgagccaccgcgcctggcccacattttttctttaaagatagaaagaaaaccagaactggtatgcagaaagggtggcaag[143 bp omitted]gaaaccccgtctatactaaaaatacaaaaattagccgggtgtggtggtgggagcctgtaatcccaggtactcgggaggctgaggcaggagaatcacttgaacccgggaggtggaggttgcagtgagccgagagactccgtctcaaaaaaacaaaacaacaaaaaattagccagacatggtggcaggtgcctgtaatcccagctacttgggaggcagaagtaggagaatcacttcaatccaggaggcagagattgcagtgagtcaagatcacgccattgcattccggcctgggcagcagaatgagactctgcctcaaaaataaataaatacataaataaaaataatagcaacagcagaaacaggcagtgacggtggagggtgtgtgtgtgaatgacctcagctagtggcagttcgtcattgccactaaggccagccacacaggtgacactgacagtgtgcagagaggccatcaagggtgtcgagctcagatcacacccttccctccccaccagggggcctgctcagcgtccactacaaaacctccgacaccttcaggaagcagaactgagcctcgggggtcttgccccttgctggcctatttttcagctaactttattgagcacctactgtgtaccaggctctactaggcagtgctggggacacagtggctgagcaagacacaaatggaccctcatcttggcagagttcagagatcagaggcgaggattcactcattttattttagtttttagagatacagtctcactctgtggccctgggctggagcgtggtggcctgatcatagctcactgcagcctccaactcccaggctcaagggatcctcccacctcagcctccccagagtgctgggattgcaggcatgagccaccacgcctggcctagcagaaagattttaaacaggtagtcagggaaggcttcactgaggaggtgatatgtgagcagagacttgaagaagagggggtagaaaatcatgcagcggctgggcaaagtggctcatgcctataatcccaacactttgggaacctgaggcgggcagatcacttgaggtcaggagttcaaggccagcctggccaacatggtaaaaccctgtctctactaaaaatacaaaaattagccaggcgtcatggcacacacctgtaatcccagctactcaggaggctgaggcaggagaatcacttgaacctgggaggcggaggttgcagtgagcagagatcatatgtctaaaatcttattgccagcctgggcaacagagctgtctcaataaataaataaaaaatcatgcaggtacctagggaaagagtgtagtaggtgggcgggcacagccctgtgcaaaggtcctggggcaggaccgtgcctggcatgttggaggaacaacgaggaggcccgtgtggctggaacagagtgaggaatgggaggaagggagggcaggcaggtaagggggcttttggaattaattcagctcctctagggcgccaagctctaccctgcctcagggcctttgcacgggctgttctctcctcctggccttctgcctccctctccccccaggttgacctggtcaacccgtcctccttcattcccaaggtaaatgtctcagtttgaatcccacacacccgactgggagcccaaggaccgggcccagaactgtccaggccaaggtgatgtccagcactgcccaacatagagttggcatacagtaggcactcaataagtgtctggtaaggttcaggagattgtcagggaagcctccctgcccctgccctgcaatgatggtgaggctggtggccctcccttatctggactcagttttcccttccagaagattccaaaggctgcgtccaggatggagatgggaaggtcgctcctctactccaaaagcatggtgggggacaggtccctctgtagtccgtccccagcctgctctgcgactgcagggggaacctgccttgccctctctcctcacccctccaggcctctctcctttcgtctccgtctctaggtccatctcaccgcctgcttcctcatctctcaatcttgctctctcactgtctctgtctcagtctttcccctgggtctccagttttctatccccccatccccgtccccaccccagggtctagagatctgctcatctttgggcaaagcctggaggccaggaaggaggagggggtaggggaagttccagatgctcctcaaccctcacccgcctaagtgtgggtgggtccccaaggaacctgggctgagacagctctaccccctccccagcttcttcggggatccccaaggccagtggggaatttctagggagaaataaacatccgtatcatttacataaaatctgcatcaattagcatatcgattacaagagtctacagaaccaggcaagccgtttgcaaggaaaatagtaactttaatgacaaatgaggccagcagcttctccatggaagcgacttgtcacacttccaccctgctttacaggtgggaaaaccgtggaggtgagttctagacagagagagggagataatctaggtgggcagggtctctgccctctccaggcatttgcagatagataatgaggaaacaagtaattggctaaaatgatttcagattattataaggaccaggaagaaaagaaatgaaggaggccaggtgcggtggtggctcacgcctgttatcccagcacttagggaggccaaggcgggtggatcacctgaggtcaggagttcgagaccagcctggccaacatggcaaaaccccgactctattaaaaatacaaaaaattagccaggcatggtggcatgcacctgtaatcccagctacttgggagactgaggcaggagaatcatttgaacctgggatatggaggctgcagtgagccaaggtcatgccactgcactccagcctgggcagcagtgagactccgtctcaaaaataaaataaaataaaaaataaaacaaaattgccaggcacggtggcatgtgcctgtggtacccgctgctcaggaagctgaggcaggaggattgcttgagccagggaggttgaggctgcagtgagctgtagtgacaccactgcactccagcctggatgacagagcgagaccctgtctcaaaaaaaaaaaaaaaaaggaaaatttaaaaagagaaaatgaagggcagcgattctctgggggcatcagggagggcctctctgaggaggtgacattgagctgagacctgaaggaggagtaggggccagatggggaggaaatatatatatatgaagagcgaagaatgaaggaggactccaaactctttcccttccatccccctcgccacctgttcttcaccctctccaatcattcccatcatcctttgggctcagctcatatcatctcctccaggaagctctccttgactgccccaactaagtcagccttgttcctgccagcttcccagagcccagcacagggcagaagccctacacgttccccaggagatggaaagaagattccctggttctggggactgaagattttgacaagctggtaatgcgcacctctggtcagaaccacgtctgcagaggaaagacccagccatatccctcttttctcagctgcctggtaggggaggagagggcagaggaggttgagtttcttggggaaaactggggtgccatcagctgttcccctccactgccttcctgtagggggtccctggggttgagggcttcagcccagctcctggggtgggaacccagccaggaaagatctggagtgggagagaaggaagactgggaggggccaggaaagtgtctatttttcctcctgcagctgtatttatagattccctttgatgtcccagcgttgggctgacctggttcttggctgcatcaggagaaagacaggttctcagagttgtttctagaagttgggcgggcggtgggagggtgggtcctcaaatgaggagagctaggtatgcaacaactggacccctgagcttggagggggtctgggatggggggaggcaaggagctggcctcagtttccctgtttgcaaaatggggatttacatgtctcttccaggttctgttcagttaaagagaagagaaacttaaaaaaaaaaaaaagacatatatagttctcaaaaagttgagactgggcaacatagcaagacccctatctctacaaaaaaaattttgaaaaaaattaacagggcatggtggtgcttgcttttagtcccagctactcgggaggctgaggcaggaggcttgcttgagcccaggaattggaggttgcagtgagctatgattgcaccactgcattctagcctgggcaacagagcaaggccccgtctctaaaaataaagaaagaaagaaaagaaatgctgaaaacttgagtcacccaaacgtcaagtaagcacatgtccatgattcattagctcattactcagggaaccaataaaatgttgaggctggttctaagagtatttgaggaactaggtatctacggagatttttttttttttttgagatggagttttactcttgttgccaggctggagtgcaatggcgcggtctcagctcactgcaacctccgcctccctggttcaagcaattctcctgcctcagcctcccaagtagctgggattacaggcacccaccaccatgcctggctaattttttgtatttttattagagatggggtttcaccgtgttggccaggctggtctggaactcctgacctcaggtgatctgcccacctcagcctcctaaagtgctgggattacaggcgtgcgccaccacgcccaactaattttgtatatttagtagagatggggtttcaccatgttagccaggctgatctcgaactcctgacctcaggtaatctgcccacctcagtctcccaaagtgccgggattacaggcatgagccaccgcgcccagaccgagattgtttttttttttaaggtggaatgttagattaagatcaggctagatacaaacgaattaatggtctatatttcagtaaagccctagttggggttctcttttctaccagacagacagaaatgatcaagttaactgtaacttcgcagggcctgagctctcatcacatggccaagtcatagacaagcacatgctcccacagcaaggttccaacagaacttcctgcagtgaaagaggcgtttgaaatctgtgctaacacagtagtcagcagccatgtggctattcagcgcttacatggtgacttgaggctgagtgcagtggctcacggctgtaattcctgcactttcagaggccgaggtgggttgggggatggcttgagcccaggagtttgaaaccagcctgggcaacatagcgagaagctgtctctaccaaaaaaaaaataaaaattagctgggcgtggtggtgtgggtctgtagtcctagctacttggaggctaaggtgggaggattgcttgagcccaggaggtcgaggctgcagtgagctatgatcccaccactgcactccaggctgggtgacagagcgagaccgtgtctcaaacacacaaacaaaaaacagtgacttcagcaagtgaggaattgaatttttaattttatttcattttaattgacaatttaatttatttttgagataagctggagcacagcggcgcaatttcggctcactgcagcctccatttcccgggttcaagcgattctcctgactcaacctcccaagtagctgggattacaggtgccggccaccacgcttggctagttttttttttttgaaatggagtctcactctgttgccaggctggagtgcagtggtgcaatctcggctcactgcaaactctgcttcccgggttgaagtgattctcatgcctcagcctcccaagtagctgaaactacaggtgcacaccaccacatccagctaatttttgtatttttagtagagacgggttttgacatgttggccaggcgggtctcgaactcttgaccttaagtaatccacctgcctcagcctcccaaagtgttgggattacaggcatgagccaccgcgcccagagattgtgattattattgactggattattttgtgctgtaaattgggtaacctccgtcttcataccttagttttcacatccgtgaaatggggtcagtaatacttgggaacacagagagctgttacaataatagagtttattcatgaaaagactttttttattttttctttttgagatggagttttgctcttgtcacccaggctggagtgcagtggcgtgatctcagctcaccgcaacctctgtctcccaggttcaagcgattctcctgcctcagcctctcgaatagctgggattacagtcatgcacaaccatgcctggctattttttgtatttttagtagagacagggttttgccatgttggccaggctcgtctcgaactcctgacctcaggtgatccaccctcctcagcctcccaaagtgctgggattaccggcatgagccaccacacctggtctaattttttttttgaaacagggtctcctgtcgcccaggctggagtgcagtggcacaatcatggctttctgcagcctcaaactcctgggcttaaaccaacctccagtgtcagcctcttgagtagctgggactacaagcacgtgtcatcatgtctggctaaaatttttattttattttatttttgtagagacagggtttcgtcatgtttcccaggctgatctggaactcctggcctcatgtgatcctcctgccttgcctcccaaagttttacagaattacaaagaattcacgaattctttgtaatttgtaaaaaaaatttacaaagaattacaggcctgagccaccacatcatcttgtaagtattattattggtggagatgaccagagatgttggctaaatttcccaaggccacacagccgggcaaggccagagctcggagttgaagcaaggtctttccagtgaaggctgggagcagtgcccgggctctctatggggtcaagagggatggcatcgggcctctgaggacccggcgcccaggctccagggttaagcctgtgtggcagctgaacttccgcggacctgtccctctaaaatccctgggaagcaaggcatcaggcgttccggaacaggcgcctgctcctgtcgggctggcgcacacttggagagacagctggcaggggactgacgggccagggaggaggggcctgggggggggagggggccttggccaggagaagaggtcaggagctgctccaacccacccacctccagatgggagccaagcgcctcctctttcgcattctctaacgcctctcaattccttcatccacttttgacaaatattattcaacacctactatatgccaggtgccctcctgaaccctttagttgagtaatatgtcaggagtcccctttacagatgtggagatcaggctcagaaagcactggccacttgtcctggacaaacagcaagaaaatggctaagctgggattgccagccagggctcttggtcctgactcagggcctttgcactggctctttcctctgcccggagcacaggcgtgagcctgccccgccaatggggtttttttttgttgtttgtttttttgttttttttttttttgagacggagtctcactctgtctcaggctggagtgcggtggtgcgatcttggctcactgcaacctccacctcccgggttcaagcgattctcctgcctcagcctcccgagtagctgggattacaggcgcccgccaccaagcccgggtaatttttgtatttttagtagagacgagggttcaccatgttggccaggctggtctcgaactcctgaccttgtgatccgccggcctcggcttcctaaagtgctgggattaccggcgtgagccaccgtgcccggcagctaatggatttctttagccctcaggttagatcacacgtcctgaggaaagccttcagggagccatcataaactcccgtgcgccccccagctaggccctctgacccccatcaccgcaatgaccacctcccccactgaactgcgaaccgcactgggggcgaggccggctctgtcggggtcacgtatccctgtatccctggcccctagcacaggtttgcagagctcacgactgtaggtactagacgctctatatacgaatgaaaggatgaagggatgaagtcagaatttctgcccatcgcgcacttccatgctgggggaaccccagctcaaggatgaggaatcaggtgctgaggtccacgctgggatctgaaggggtcttcatggaggacggtccttctggcagggtctctgctcaggggagcccagcccgggactggtgtgccgggcagggggtctctgtagggagagtccctgccgaaggggctggaactgtgcggggcgcccctgaatggtcgaacctggagagctttgttgctcagatgaggaagggccagggaggccaccctggaccaaagggtcacgtttctattcttcctggcccagaatggacagccccagaagaagctgacagtcggggtgcgccccgcaaggggaggagctgagagaggggcggggctgagagaggagggggctgaggaaggagagggggctgagagaggggaggggcttagaggggaggggtgagggaggagaaggggccgagagggggagacgttcagaggggaggggtgagggaggagaggggggctgagagacgagaggggctgagagaagagagggggccgagagaggacggggttgagagaggggaggggctgaaagtggtaaagctgagaggagaggggcggggctgagaagaaggggcgaggcgggaaggggcagggctgagagaaaatgggtggggctgagaggagaggggcggggctcggaggcggggggcgttgtggggcagggctgagtggggcggggttgagaggagaggaagctgaggttggggaggggcgtggagaggggagggggggctcttcgaggggcgggaacagggctcaaggaggctgagtggggcagagggggccgcctaagttctgtcctcccctggggccccaggacacagggtcaggagtgtatcaagtcaccgggtttctgaccatccagaaacctgaccgcgtgcgtccccggggctcggggtcgcccctatcccatgctctacctccctccctctcctcgggccctcctggctccctctgacctccccaccgccagtcagctgtgtctgtatttagagcggtgcaggcctgtgtcactttacttccgaaagggattttgcatctcttagtgctgccttcagaacccccaacacctgttgcggcgcgagcccgtgccacggggagggggtggtctcgcttctggagccactgtgggggaggaggctcagctgcctcccctccccgagaaccttctccctttgtgcaccccctcccttctgagccccttctctaagtccccatgtccccctcccgtcccggagcccccccttctctaagtccccccggccctgccccctgccctctcggagccccctctctgcacgccaactcagagccgcctcgttcccaggctccccaaggccccgagccctgcctgtccccctcctcccctggcctgtccattgtcctggtgagggggtcctggaggctgggcgggccggggtctgcatgcagggggcgggagtcgcctgctacccagtcgtctctgggcaacgctggcaaacctcacgcctagacacagaggctgcgctgttctctgggaggggacagggggcacaaggtgactggggagatgctgggggtgacggctgtggatatgagttttcaggcagggggtgccagaggcagctccaactgctccaggtgggagaaaggttcgagagcgtggccatgggaaacgttgtccccctgctgtccccacggcgacctccaactcactcgacatccttccttcctctgcaggccctcctgctctgccccatcccacagtggggtcttccatgcctgctctgatatgttcatcatcacagccttcccagttggattttgcaattaaacccactttacagatgagaaaaccgaggcccagagagcatttggtgattgaagcagtgaggagaccacacttttggggctatggcccaggacccgagccccaactctcctgttttctctccacatgacctaacagcttctctgagcctcagtttactcatctgtaccgtgggcagatggtggtacccatttcctgggctgtttttactgtgtggggaataagatgcttaaacagtctagggttcaaacttgggtgccagttaccagctgtgcaactggtcaggccatgttgccgctctgtgcctcagtttccccgtcaacaaaatggggtctataatagcatctacttcataacgtggctgtgacagtgaaagttaattctaggccgggcgcggtggctcacgcctgtaatcccagcaatttgtgaggccaaagtaggcaggtcacttgaggttaggagttcaagaccagcctggccaacatggtgaaaccctgtctctattaaaaatacaaaaattagctgggtgtggtggcggccacctgtaatcccagctactcaggaggctaaggcaagagaattgctcgaacctgaaaggcagaggttacggtgagcgaaactctgtccaaaaaaaaaaaaaaaaaaaaaaattaattctagtacatactggcttgtagaaaaccctttataaatgttattgttactatattttttccttctgagtttgtgccttttttcttttttggtgatagggtctccctctgtcactcaggctggagtgcaatagagtggtctcagctcactgcagcctccaactctcaggctcaagttatcctcctgcctcagcctcccgagtaggtgggactacagatgtgcgccgccacgcctggctgttttatttttttgtagagacagggtctcgcaatgttgcccaggctggtctcgaactcaggcttaggtgatcctcccgcttcggcctctgaaaatgctgggattccaggcatgagcctccgcacctggcttgagtttgtgctttctatgaggttcagagaggcttgtgtgtggggaggtcatcgtcccaggcccttccaggccctcaggcttggagttagggattgagggtgtgagatggttccctggggtaactctatctgggaaccagtccccgtgcctgttgagtgatatagtggattccactgccacaccttctgtctcccctgcctgaactgtgtagacgacccagggcccctgatggtgaggactctgagtctgcccctgtcagggtaattgccagagagtgcacagagcaaagcctccatagctcccaccctggactgtgactccctgggtgcagagggggtgcagaccctgttttctgcacataaacaggtgcacctgttgggtcctcacttgaggctgctgggccagcagccccctagctctcccactacaagcagaggggagaaggggcatagctgccccctccgcctgccacagcagtcaccaaggttcctgccagctgctcccttctcagagttcactgggcatcagcctgtcaggcactcacagccgtgccctacctcctggggttaccataaacatacattaacagccccatccagcacttattgaacccgatatgcaacatgtgtaattgcatgcaatcccccccaacagtccccaaggaggcaggtgctattatcagcctcattttatagatgggaaacaggctcagagaggttctgtcacttggccaaggtcacacagcagggaagtcacagagcagggattcaaactccaggctgcattctttatttttttattttttattttttctgagacagggtcttactctgttgcccaggctgtagtgcagtggctcgatctcggcttactgcaacctctgtgtcccgggctcaggtgatcttcccacctcagcctcctgagcagctgggactacaggtttgcaccaccacacctggctaacttttgcgtttttttgtagagacagggtttctccatgttgcccaggctggtcttgaactcctgggctcaagcaatcctcccaccttggcctcccaaagtgttgggattacaggtgtgagccaccgcacccagcccaggctgcactcttaaccaccaccctttgctgtctgtcacaacaaataacaactgtgtgtggcctgaggccactgtgcaaaacttggaggtctgtgctctcatcagcctcactgtgcagaggaggaaagcaagggccagagacagggagggcctggctcaagggcacaaagcaggcagggggaggaataaagatgagcataagggttagcctgcctctgagtgaatgagtgcatgaggtagggagggagtgagggtgg[137 bp omitted]caaggtgaaacctcgtctctactaaaaatacaaaaattagccaggcatggtggtgggcacctgtaatcccagctacctgggaggctgaggcaggagaatcacttgaacccaggaggcagagctttcagtgagccgagaccgtgccactgcactccagcctggcagcctgggtgacagagtgagactccatctcaaaaaaaaaaaaaaaaaaaggtggtgaatggatgggtgattagatagatggatgtatggatgagtgaataaatgaatggatggattatggatggattatggatgaatggatgagcgggtggatggatggatggatggatggatgaatagagaggtgggtgggcaggttggtcagtaaatggatgtatggatttgtgaaatgatagttgtatggacgatggatggatggatggatgaacagatgaatgtatgcattatgggtgagcggactgataaatgggtgcaggtgtggattacggatggatagatggatggatggatgaatagagaggtaggtgggtaggtaggtgggtaagtggatgtatgtatttgcgagaggatggatgtatggattatggatggatggatgaacaggtgaatgtatggattgtaggtgggtggattgataaatgggtgcaggtatgaattatagatggatgaatggatgtatggatgagtggatggatgaatggattatggatggatggatgaatgggtaggtggatagatggatgagtgaatggatgggagggcggatggttatatggattatgggtggattaatgggtgggttagtggataaatatatggattatggatggatggatggatgagtaaatggatgaatggatgggtggatagatggatgtgtgggtggatggatggatgggtgagtgcatggatatatggattatggatggatggatttggatagatggatgagtggatgggtgggtggatggatggatggatggatggatggatgggagtattgatgggtgggtggatggatggattgatgggagggtggatggatgggtgagtggatggatatatggattatggatggatagttggatagacagatgagtagatggatggatgggtagattgatgggtgggtagatggatggatggattgatgggtggatggatggatgggtgagtggatggatatatggattatagatggatggttggatagatagatgagtagatggatgagtggatggatatatggattatagatggatggttggatagatggatgagtagatggatggatgggtgagtggatggatggatgggtgagtggatggatatatggattatggatggatggatctggatagatggatgagtggatgggcgggtggatggatggatggatgggaggattgatgggtgggtggatggatggatggattgatgggaggatggatggatgggtgagtggatggatatatggattatagatggatggttggatagatagatgagtagatggatgggtggatgggtgagtggatggatatatggattatagatggatggttggatagatggatgagtagatggatggatggatggatggatgggtagattgatgggtgggtggatggatggatgggtgggtgtgtggatggatatatggattattggtgggtggatggatggatgagttagtgggtgggtatatggattactggtggatgtattaatgggtgagtgaatggatatatggattactggtggatggatggatggattgtttttcacccttcctctgtagggagctctaagcttggttcacacagcagatggggtgagagggtggtgggtgggatagacactactggagtcagttccaagtaggtagagaaggattctggaatcaattccagggcagcatctaagagagcatccagccattcactccttcagcaaacacgtattgagcacctgctgcatgccaggtgctcttctaggcactgggcgtctgtccggcagggaacagagcagacaaaatccctctcctgtggggctgacaacttcaggagggcgtggggggtgtgagagccccattggagcaggtttaggagggaacaggaaatggggaagtggagacagcaagtgttgatggg[142 bp omitted]tctactaaaaatacaaaaattagctgggcgtggtggcatatgcctgtaatcccagctactcaggaggctgaggcaggagaattgcttgaactcgggaggtgaaggttgcagtgagctgagatcacgccactgcactccagcttgggcaacagagtgagactctgtctcaaaacaaacaaacaaaaaatcattaccctaatgcgggttattacaagttcctgatgcttcagacaattctccaatggccccagagtctgtcgtgccctttcccacaaggttaaaagtgacagcaggcctgtaatcccagcattttgggaggcc[225 bp omitted]tccgtctcaaaaaaacgaaaaacaaaacaaaaccaaacaaaaaaagtgacagcaggcagccagggcctcacagcccaaggtctagtcccaagggtctccatttagaagttgttggtttttattttaatgtgttggtttgaaagtcctggaggctgcaggttcttgcatctcagccctagaggagtaatgaagcttctccagggagaatgagaagctggaaacagcttcaagaaatcgggttactgaggcagggacaggcctgatgaaggctgggaggtgggagacccctgtctggcctatcccacctgccagtttatagattatgtgtgacagggggcagcacccaggagccgggctgaatcctttcagctaatggacatttatggcgtgcacagcaggtgcaaaggctctggggccacgtggagcatggactgttacagaaatggttacaggttcctgaattagcccattttcttttcgtctcagagcctcatttaccccatctgtgtaatggacataagagaacctatctttctaagttgtgtgcatatgttttcaccacgttcagactgtgtgtgtgtgtgtgtgtgttacctgtgtcctccccaaaacactttaacattcactcgtttttttccttggagacagggtctctctgtcacccaggttggattacagtggcacaatcacagctcactgcagcattgaactcttgggctcaagcaatcctcctgcctcagcctcctgggtagctaggaccacaggcatgtgccaccatgcctagctaatttttaatttttttttttagaggtggggtcttgtggtcaggcgtggtggctcgtgcctgtaatcccagcactttgggaagctgaggtgggcagatcacttgaggtcaggagttcgagaccagtctggacaacatggtaaaacctgtaatcccagctactcaggaggctgaggcaggagaatcacttgaacccaggaggctgaggttgcaatgagctgagatcctgccactgcaatcactccagcctgggcagcaaagcgacactcttttttttttttttaaagatggaatttcgctcttgtggcccaggctggagtgcaatggcacgatctcggctcactgcaacctccgcctcctgggttcaagcgattctcctggcttcaagtgattctcctggctcagcctcctgggtagctgggactatagacgcccgccaccacgcccggctaatttttgtattttcagtagaggcggggttt[141 bp omitted]ataattttaaaaagttagatggggtcttgctattgcccgggcttgtcatgaactcctggccacaagcaatcctcccctctcagcctcccaaagtgctggaattacaggcgtgagccactgtgcccagccccaatgttcacttttttaaaattaggtttactctctctcaccatttgaatgtcagctctacaaggacagcaatctgcgtgttctattcactactgaaactgcacagcctggcatacagtaggtgctcaatacttgtggaaatgcataagtgataacctccacagaacactaagtacaggctagagccgggcttcagcatttcctaggcatgcatttatttaattaccccaagaagccccgtgagaaaggtggtattagaggctgggcatggtggctcacacctataatcccagctatttgggaagctgaggtgggtggatcacctgaggtcaggagttcgagaccagcctggccaacatggcgaaaccccgtctctactaaaaattcagaaattagccaggtctggtggtcggtgcctgtaatcccagctacttgggaggctgaggcaggagaatcacttgaacccgggaggtggaggttgcagtaagctgagatcgcgccactgcactccagcctgggagacagcgagactcggtctcaaaaacaacaacaacaaaaaggtagtagtattaggatcccattttatagacgggaaaattgaggcatagagctgttagatttgagcccccccactcccctctcctccccccacccccgcccccccaccaccccgagtccagcccctgtgtgctaccacctctggctctggacctgtgggtttgtcaacacgtgttcttggcatgaccaggtgcaggaacatcacacataccaggagcttgcacgggtctggggtgggggccacatcagcctccggaacctgagcctgcagggcagcgcgtgccccagtcccgggggccacaggagggagcgcgtaggtagaggcggcgggtccaatctccacgccttgttccctctccgggagccggcttccctcccgcctgcctcggcctggacccggcccagctgctgacctcgggaactcgagtgcccccagggacgcagacaatcaattagaattggcagcgcctgcctaagtaaaaggcctgctttaatgaggaggctgtggctctgccgtgggcgcaggcgctgggctgagcccggcgcgggctggagctgaggggtcacgtggccaccagggcccacctgcctgtcacaattatgagtccccgtgtgtgagctcattatgtttatcattaggccagggctatttacagatcggggagagcagccccttgtcatgcaagccgcagacatttattgagcaccagctgtgtgctaggtcatgtgctgggttcgaggaaacagtagggacaagacgccctccagtgggggccaggggagacatcagggtgggcttcctggaggaggcaacacatacactgagattggaatgatgactcgaaattcg[144 bp omitted]caacatggtgaaaccccaaatctactaaaaatacaaaaattagctgggcgtggtagcgggtgcctgtgatcccaactactcgggaggctgaggcaggagaattgcttgaacccggaaggcggaggttgtggtgagccgagattgcgccattgcactccagtgtgggcaacagagcaaaactccatctcaaaaaaaagaaaaaagaatgagcgcagcctgggttgtggcggggggggctcctacctgtaatcccagtgctttgggaggctgaagtgggaggatcacttgaggccaggagttaaagaccaacctgggcaacatagtcagacccccatcacaaaaaaaataaaaaaattagccaggtgtggtggcgcacatctatagtccagctacttgggaggctgagatgggaggattgcttcagcccaggaggtcgaggctgtagtgagcaatgattgtgtctctgcactccagcctgggtggcagagtgagaccccatctcaaaacaaaaaattgaattagttcccgtgtacgggttgttcaaagcaagataacacagcaaaggaccatgaagcctgcagatgaatttcatctcgaggtcctgaatcaattacatctgcaaagaccctatttccaaaaaagctcatattctgaggttctgggtgtgtataatttttttttttcagacagggtctcactctgttgcccaggctggagtgcagtggtgtgatctcggctcactgcagcctttacctccccggttgacgtgattctcctgcctcagcctcctgagtagctaggattacaggcagctgccaccatgcccggctaatttttgtatttgtatttttattacttatgatctttttcctgagaccaagtctcactctgccacccaggctggagtgcagttgtgtgatcttggcttactgcaacctctgccttctgggttcaagcggttctcctgtctc[131 bp omitted]cctcggcctcccaaagtgctgagattattacaggtgtgagccaccgtgcccgacctatttatttatttatttttgagacgcagtctcgctcgtcacgaggctggggtgcagtggcgcgatcttggctcactgcaacctctgcctcctgggttcaaatgattcccctgcctcagccttctgagtagcttggactacagccgtgtgtcaccatgcctggctaatatatattttttttttttgtattttagtagagacaagattt[132 bp omitted]tttgagatggagtttcactcttgttgcctaggctggagtgcagtggcacaatctcagctcactgcaacctctgcctcccaggttcaagtgattcccctgcctc[134 bp omitted]catcctcccaa[160 bp omitted]gattctcctgcctc[184 bp omitted]agtgtatgtaatttttgaatttatttttgcaggcaggcactactcaacatggtacaatgtgtgcttgttcctatctgcctcctgctctggaatgtcaactccaggagggcagacttctgtctgtcttgaatgccacagtgtcccctgtacctcaaatactgtttggcacacagtaggcactcaatacgtgtttgtttattccgcaaacaactatgaagcacccactgtgttgttctcacacggaggtggagtttttcatgctccgaggacttggggcagagagaaggacaagtaggagccacggtgactgcgacttccttttttttttctgcagcctcaggtgccagcagcaataacacaggacctctaggcagaggaagggaagaggcgctgagggaggcagggcttctgcggcggggaggggggggcagagcccctggggatcaggccagggaggcgggagtcctgctggagtccctggggtccccagcagagaggctggctggctgccctgccctggcctggctgctttttctggcttggacgggaagggctgacaccgccagaggagggcagggtggaggcggggagggggcccgcacctggacccaggaagaggtgggggaaagaagtggagcctgggaaggggagacagaggaggtgaggagagaaagagagaaaccaagagagatagaaagagacccacacagagaagctgagctggagtcagacagataaaagacacggagagactcacgcagaaggtggcaaagacagaaacacagagagatggacagagacagtcagagataaagggagactcagagagacagaggagacccacagagatacagactcagagagatagagagacacagacctagagagagagagaacaacagagacagagatagaaagagatagtcagagataaaaggagactcagagagatggagaattagccgggcgtggtggcgggcgcctgtgatcccagctactcgggaggctgaggcaggagaatcgcttgaacccgggaggcagaggttgcagtgaaccgagattgcaccactgcactccagcctgggagacagagggagactgtccccccgccaaaaaagagagagagagagagagacaaagagacttagagagagagagagagggaaagaaagacagggataaaagtagattcaaagagacagagagaaaacaagagaaaggagaccaatagagatcaaaagaggtagtcagagataaaaagagactcagagagacctagagacagagaaagacagagacagagacttagaaagagaatggggaagaaacagagagatagaggcaggcgagaggctccctagcccatccccctccccaattttcctctctggggcacccctggggtctggggctctaaccctgtcctggtccccacccctccccctagctggtacttcagaccccctccacaaactggctgagtgcccccagtccctaactcagggtctcctcagctcagagctccggggctcagccctgagaccttctgggattcaggatccgaatgcccagtggagccagaatctgaatcccagaggcagggacaccattaatcctggaaagagggcaccccctccacccgggcctgagctgagagcggggaggctgtctatatgaagcccccacttcacacttcccacaggagagattcaccctgtttcacaggggaggaaactgaggcttggagaaagacgggattgtggagaggtacacgtttgttcatccagaaaatatgcactgagatgggcgcagtggctcatgcctgtaatcccaacactttgggagcccgaggtgggcagatcacctgaggtcaggagttcgagaccagcctgaccaacatgatgaaaccccgtctctacttaaaaatacaaaaattagccgggcgtggtggcgggcgcctgtaatcccagctactcaggaggctgagggaggaaaatcgcttgaacctgggaggcagaggttgcagtgagtggagatcacgccactgcactccagcctgggtgacagagtgagactccgtctcaaaaaaaagaaagagaaaaaaatgagagcgggaaagaaagaaagaatactgggtatcatataattgactcataaatatttcaatttttcaatttgtatctttttttttttttttgagacagagtttctctcttgttgcacaggctggcgtgcaatggcgcaatctcggctcactgcaacctccacttcctgggttcaagcagttctccttcctctaactgggattataggagtgcgctaccacgcctggctaattttgtatttttagtaaagacagggttttaccacattgatcaggctagtcttgagctcctgacctcaagtgattcacctgcctaggcctcccaaagagctggtattataggcatgaccaattggtatctttaaaagataaggaggactatgctgaaaattttaacaatggccacctgcagtggctcatgcctgtaatcccagcactttgagaggctgaggcaggtggatcactggaggccaagagttcgagaccaacctggccaacatggtgaaatgccatttctaataaaaatacaaaaattagctgggcgtggtggcaggggcctgtaatcccagctacatgggaggctgaggcaggacaatcatttgaaccagggaggcagaggttccagtgagccgagatcgtgccactgcactccagcctgggcaacagaatgagacggagtcttgctctgtcacccaggctggagtgcagtggcacgatcttaggtcactgcaagctctgcctcccaggttcacgccattctcctacctcagcctcctgagtagctgggactacaggcatatgcca[142 bp omitted]gccaacaataattttattctatcagcaaatatctcatcggcctcaaatttctatcaaaagtgtcataattttttttacagtttggagcatgatccaaatacagttcacacatgtatttggttgatatgtcttttttttttttttttttgagaccgagtcttgctctgtcacccaggctggagtgcggtggcgtgatctcggctcactgcaatctccacctcccgggttcacgccattctcctgcctc[135 bp omitted]gcctctcaaaatgctgggattacaggcgtgagccaccgtgcctggctgcttgatatgtcttaaagtttcttttagcctataggttcctatccatcgctttctcttctttttttttttcgtgtaatttatttgctgatgatgcattattttattttaggtgtattcaaaagaacatacacatggattttgtttattctttgttgtttctatgtatgcaatctgacagcctatgtcttttaagcgatcagtttaattcatttatatttattgtgtttgccaacatatttggctttattttcatcactttctttgattgtattttatagttaatatgaattttttctgctgcttccttttcatcttctcttcaaccttctgctgaatttgccagattttctttgttccttctcttttttttttttttttgagacaagagtttcgctctttttgcccaggctagagtgcaatggcgtgatcttggctcactgaaacctctgcctcccaggttcaagcgattctccggcctcagcctcccaagtagctgggattacaggcgcccaccaccaagcctagttaattttatatttttagtagggattggggttttactacgttggccaggcttcaaactgtaaaaaaaattgggtctcaaactcctgacttcatgtgatccacccgccttgacctcccaaagtgctgggattacaggcatgagccaccgtgcccggcccaagcccagccaatttaatatttaaagtagagataggattttaccatgttggccaggctggtcttggactcctgaccccaggtgatctgtccgcctcggcctcccaaagtgctgagattgcaggtatgagccaccgagcctggccttctttgttcctttcttattccccctcatgatttggaagttatgcattccatttctgcctttgagtagtcacccttacactcttaccatgtatacttagcttacaataactggaagttaatcaacatctctttgttcctccgaatgagacaaggacttcagatgtgtacatactggagctttcctccactctgcatgtcacttttatcccatatttgagttctgccttggcacacctaaggatggagatgaggacagggggtggtgtgtgcccatgtgggtcaccattctcccagatggatggcagatgtggagatggattccagagaccctaactgtctgtgagttcaggcaggttctgcattgggcctcagtttccccatttgtaggacagcactgagtccctctagggctaatatctgaagactgtgagctcccaccctctcccttcttcccaccactcaggatgaccagagtgcaggggcctctggttacactgcagataatgaggggcctctgtcgctaggcccaccacaaaatgagcttgcaggagaacgcgacagctaatgtcattatttacttcactgagctaaataatctagggaattgctcatcaggacctgataatttgattggatttcatgcacaattaggtcttcagagctgaggcattagtcggcgagttcaggaaagacaccaacctccctgctggagaggctcaaggtaaggggacaacgacggagatccccagccccaggaaagggtcaggcgtgcaggccagagggaggcctgaattggccaaattcagtggatccagcctaggctggagctggagacccaccagtcatagtcaacttgacattgcttacttacgagttggttgatattagcagaattattattattattattattatttgagatggagtcttgctcttttgcccaagctggagtgcagtggcgcgatcttggctcagtgcaatctccgccttctggattcaagcgattctcctgcctcagcctcccgggtcgctgggattacaggcacccgccaccatgcctggccaggagaatgatatcacgggagaaacaaccatagtgaacacagttaggtttggtcacttttgcttgagatgtttatttttcttcttacatgaaagaattcaagatgaccccttaaaatctaagtcagggccaggctcagtggctcacatctgtaatcccgacactttgggaggccgaggagggtggatcacctgaggtcaggaatttgagaccagcctggccaacatggtgaaaccccatctctactaaaaaatacaaaacttagccaggcaaggtggcaggcgcttataaccccagctaccctggaggctgaggcaggagaatcgcttgaacctgggaggcagtggtggcagtgagccaagatcatgccactgcattccagcctgggtgacagagtgagactccatttcaagcagaagaagaaaaaaatctaagtcagatctgtccttctcctgcctacagccctctggctcccacctccctccaggtcaaagctcaagtcctcccagaggcccaccaggctctttacaacctttcctgcccccttcctgccctcccctcctccctctcttcgcctcgttcactctgccccagccagacgggcctcttcactgtccctccaacaccaatacaccaggtgcggtcctgctccagggcctttgcatgggatgcaccctcttcccagaacagctgtgcccccagatcccctcagagttgtctcattttcctgttctaggtctcagcttaaacgtcacctcctcagagaagccattcctggctaaaataacttcatccccaccatttgctatgacgtcatcttgttaaattattacctaggctcagcaccccaatccaaaaatccaaaatccaaaatccaacatgctccaattgaaaatgctttgaccgacgagttaatgggtgcagcacaccagcatggcacatgtatacatatgtaactaacctgcacattgtgcacatgtaccctaaaacttaaagtataataataatttaaaaaaaaaaaaagagaaaatgctttgaccgccgacatggcactcaaaggtaataaggctccttgcagcatttcagattttggattttcagattagggatgctcagctggcaagtataatgaaaatattctgaaatccgaaaaaatccccaatccaaaacacttcttcaccatggaaaaatgcttctgttccaaaggtttttttttcttttttctttttttttttttttttttgagacggagtcttgctctcgcccaggctggagtgcagtggcgccatctcggttcactgcaagctccgcctcccgggttcacgccattctcctgcctc[221 bp omitted]tgtcccccaagccggaacgcaatgacgcaatcttgactcacttcaacctccgtctcctgggttcaagtgagtctcatgcctcagactcccaagtagctgggattacaggtatgcgtcagcacccctagctaattttttttttttttttttgagacggaatctcgctctgtcacccaggctggagtgcgatggtgtgatttcggctcactgcaacctctgcctcctgggttcaagcgattctcttgcctcagcctcccaggtagctgggattacaggtgcccaccaccatgcccagctaattttttgtatttttagtagagacggggttttgccatgttggccaggctggtcttgaactcctgacctcaggtgatccacccgcctcgtcctcccaaagtgctgggattacaggtgtgcgccaccatacttttgtatttttagtggagatggggtttcaccatgttggccaggctagtctcgaactcccaacttcaggtgatctgcctgcctcagactcccaaagtgctaggattacaggcatgagccactgcatccagccatcccaagcattttggataagggattctcagcctgttttatcccagggaccagtgtctggtgcccccactctcttcccaactctgagctccccaggattgtccctctgtcccagccctgacccctcagtcagtgtccagctgtgtccagttttacttctccacagcctggtggctcctcatgagccaaaccaagacggaggactctctgggccccaatgcctgtattttggggtacatgaccctggaggcctttcctgcgtcatctccatcctatcccctccacagcacccattccaacatgagccacaggacaatcttgccatgtccaagtgcactgactttatttcacccccacccggcctttgcccatgctggtccctgtaccagaaacgcttttccccaaagccttttcttcctggcaatcaattgccttcaatagctttgcttccagctcctctttctgagcccctctggccactgcccacccagttctgggtttcttccaccccagcctgaacatgaggggctgtggggtggactctgggagaccccgaggctccagcactggccaagactggcccgaataccccatgatgcctgctaaaagaacccccaaaagctactcaggcgattatgatccgaacagcactctgagtgtctagggctggccacatctctctccctctctcccagttctccatgatgatctctccgtctctccttatctctgtgtgtatctctgggtctctacacgtctctctgtgtctacatctccctctctccctctctctctccctctcccccctttctccctccgtttctctttctctctccctcctctttccttccccctctctttctctctctcccctttctcattctctctttccccctctctccccgccctttctcattcttctctctctctccccagccctctctttctctgtcttcccccgaccccccacctgggtctctctgcttctgtatctttttgtctctgctcctcccatggggcaccagcttcacccaccaccttcttccccacccctccctcttctccactttctcccttccccacgccactgtggatctggcactggctgggcacagggggatggtctggccttcctcccccacctctcctgtctctgcctctcctctgactcagcctctcctctgtctctgcctctcctctgactcggcctctcctctgtctctgcctctcctctgcctctccctctcctctgtctctgcctctcctctgtctctccctctcctctgtctctgcctctcctctgtctctccctctcctctgtctctccctctcctctgtctctgcctctcctctgtctctgcctctcctctgtctctccctctcctctgtctctgcctctcctctgtctctccctctcctctgtctctccctctcctctgtctctgcctctcctctgtctctgcctctcctctgtctctccctctcctctgtctctgcctcccctctgtctctccctcttctctgtctctgcctctcctctgtctctccctctcctctgtctctgcctctcctctgtctctccctctcctctgtctctgcctctcctctgtctctgcctctcctctgtctctgcctctcctctgtctctgcctctcctctgtctctccctctcctctgtctctgcctctcctctgtctctccctctcctctgtctctgcgtctcctcagtctctccctctcctctgtctctccctctcctctgtctctgcgtctcctgtctctgcctctcctctgtctctccctctcctctgtctctgcctctcctctgtctctgcctctcctctgtctctccctctcctctgtctctccctctcctctgtctctgcgtctcctctgtctctgcctctcctctgtctctccctctcctctgtctctgcctctcctctgtctctgcctctcctctgtctctccctctcctctgtctctccctctcctctgtctctgcgtctcctctgtctctgcctctcctctgtctctccctctcctctgtctctgcctctcctctgtctctgcctctcctctgtctctccctctcctctgtctctgcctctcctctgtctctgcgtctcctctgactccgcctctcctctgtctctgcgtctcctcagtctctccctctcctctatctctccctctcctctgtctctccctctcctctgtctctgacgttctatttccgtctcgcaggctctgggtgcacatctcccccggggctgccaacctctgggctccacactccccactctcctgcggcacccccctctctgctacttccagatcccccacctgctcctgcctcccaggtactgaggcagagacgggagatggagtttatgagtttttttgaggcggggtctcgctctgtcgtccaggctggagcgcctcatagtggtgcgattatagctcactgcagcctcgaactcctgggctctagcaatcctcctgcctcagcctcctgagtaaatgagactacagttgcctgctaccatgccagctaatttttaaattttctgtagagatgggatctcgttacatagcccaggctggttttgaactcctggcctcaaggggtcttcccgcctcagcctcccaaagcgttgggattcaggcgtgtgccagaacacctggcccagggagatggaattcaaatggattttaaggcttcaccttctccctggctggctggggaggaacagagagggaaaggggcctccccgaggtcacacagcacctggcctgggaccccctgcggctttgagtgggagtccccacagggctccggatttgagttcagcagcccaacccttgctgtgcgattgggggcagtcaactctgcatctcggagcctcagtgtcctcctctgtgtagcaacaatggctgtgccacctccatgggtgacagtgaagccagccaacatagggaaggtgcttctgactttagaacatgggaaattggaagcatgggaactactatagacatctattcccattcccaggaggtggccgggcgctgtggctcactcccagcactttgggaagctgaggcgggtggtgaaaccccatctctactaaaaatacaaaattagctgggtatggtggcacatgcctgtaatcccagctactcggggagccgaggcgggagactcacttgaacctgggaggcgaaggttgcaatgagctgagatcgtgccactgcactgcagcctgggcaacagagtaagactctgtctcaaaaaaaaattatatatatatattcccaggaggcggaatgggaggatgggaggtggggaggggccagctttgtgtgagaccctcatccagagggcaaatttgttctgagagagtgcccaggggtgcacagacttggggtgaggcggctgggaagagcttgtctgtttcaccaagaaataagtgtgaatgcagggagatgggggtggaggagagcactggggttgcctagcaacagagatgaagctgacagacaggatccagacctgctgtccagggtctggggggtttcaagaaaggggggtgctgatatttgggatcttgtgtttttctggctgagaaggtatccccaccatggccctccaaacttcagcagagttgaccccagactcaggggtcttagggaccccggagcctagaacagagagattcagtggtagccggagattcatgtactcgggaaagaagcagtggagacaaaagcagactcggccccctttccagccccggccctgacagttgcagagatgttgatggctgaggagaaccggattgccatttatgaacttctctctctctctttttttttttttctgtgacttgagttttgctcttgtcgcccaggctggagtgcaatagtgtggtctcggctcactgcaacctccgcctcctgggttcaagtgattttccagcctcagcctcctgagtagctgggattgcacgtgcccgccaccacgcctggctaatttttatatttttagtagagacggggtttcaccatgttggccagtctggtctcgaaatcctgacctcaagtgatccccccgcctcagccttccaaagtgctgggattacaggtgtgagcccccgtgcccagtctatgaactcctttttaaggagggagtcatggtggccaagaaggatgcccacctgcctaagcacccagagctggcagacaggaatgtgcccaacctacacgtcataaaggccaaacagtctctcagatcatgagg[139 bp omitted]cctcagcctcctgagtagctgggattacaggcacccaccaccatgcctggctaatttttgtatgtttagtagaggaggggtttcaccatgttggtcaggctggtctcgaactcctgaccttgtgatccgcccgcctcagcctcccaaagtgctagaattacaggcgtgagccaccatgcctggccaactggagacgtttctactggtaccttaccaatgagggtatctagtgtctccatgatgacctccagctgccctcagagagtgtgcctgccactctatgccgcagccgtccagagactggtagaccttggcctaaacgtctggagggtgagtgccctccaagactcccaagaggggaagctgacagagacccacaggtggggcgctgtgccccctggtgctggccaggaagccaaggctggggctgggccagcaaccgaattccagtttagaggtggatttggtggtggacatggtcagccacctcggtaaaattggagaggattagtttgcactgaataaacttacagccagaaaaacaaacaaacaaacaaaaaacagacttggccctgtcttcctggcagttccagcctcatggctggaaacatatataattgtttgttttgagacagagtctcactctgtcactcaggctggagtgcagtggtgcaatctctttgctcactgcaaccttcacctcctgggttcaagggattctcctgcctc[134 bp omitted]tggcttcccaaagtgctgggtttacaggtgtgagccacctcgcctggtcggattctagattttagattggccagtttggtcccagctgttgggggcgggactggagaaggtgggagaggctggggaagagcccttgggcagaggggagggaaggatggagacgaggcaggaggtgggacctatgtagagggcagggcaggaggtgagtttgatgcctgcctggggctggggccttggaccttcccctctaggcagccctgcctctgaagctgtttctgagttttctgccttccccatcctctgaattcccctgtctctccccgcctcgctccctctgctgcccgtgatgaagaatggaattatatttttataacttcttgtttttcctgaaccaagttccatgtgcactgggctaaatttaaaaagcggatggatggagagatgatcatgttcactttcactcccttggaaaaaaataaacgccttgattcaggtgccatttccctcggggacactgggggcggggtggtggcctttctgctcacagtgacagggctggacagagataagtcagacctggattccagctgcctccttccggaagccttgcctgacctgtgcctgaaccaggcccacccctcagatcttctgacaccctgggcatcccccaaaacagccctggtcaccctgtgc[144 bp omitted]ctcccagattcaagcaattctcctgcctcagcctacctagtagctgggattacaggcgcgcaccactacacccatcctttgccatctttagggctagcttctcaacctttagggcttagctccaatgttacctcctccaggaagccctcccggaccgccctgactaaagaagctacgaagttgttttctatcacatcatcatcataatcttctttttttttatgagacagggtcccctgtcgcccaggctggagtgcagtggcatgatcacagctcactacagccttgaactcctggactcaagcaatcctcttgcctcagcttcccccgtagctggaacgtagctagcacaccaccatacctggtgcttgtattttctttttttttttttttgagacggagtttcgcttttgtttcccaggctggagtgcaatggcatgatctccggttcactgcaagctccgcctcccggattcaagccattctcctgcctcagcctcccgagtagctgggattacaggcatgtgccaccacacctggctaattttgtatttttagcagagatggggtttctccgtgtgggtcagggtggtctcgaactcccaacctcaggtgatccacccacttcggcctcccaaagtgctgggattccaggcgtgagccaccgcacccagcgcttgtattttctttagaacattttttatcacccggaattctcttaggctaatatttgtaatttgttaagcacagttaagggaactggatctggactgcctaacccctcccaagtcccaactacaggctggcccctgccagcctgtccctgtagccttcattttcactctccctgcattattcagtcaccactcagcaaacatgttttaagtggctactgcactagaccgtgtatctcatggctcctagtcctgccctggtgcttacaatcacccagggagtttcaaattccaaccaacaccttccatccctcccctccactggagattatgaatgaatcggtctagagctgggggctgggaaaaggattcaagtgtgccctcaggacatagaacaattgctgtaggttttgttttttcctttttttttttttttttttttttgaggcagcgtctcactctgtcgcccaggctgcagtgcagtggtgtgatttcggctcactgcaacctccgcctcccaggctcaagtgattctcctgccgcagcctcctgagtagtagctgggattacaggtgcatgccaccacgcctggctaagttttgtattttaagtagagatgggtttcaccatgttggccaggctggtcttgaactcctgatctcaggcgttcctcccaccttggcctcccaaagtgctaggatgacaggcatgagccaacatgcccagcctctgcaataggttttcttatctcccaaaggccgtgctcactgctgcccccaagcctttgctgaagctggtccctctgctggaacacactcctgcttcctctccacctatttaaatcctccataactttctttgttataaacattttttttttctaattttgaggaaagtaaaaaggaaagacaagtgcaaagacaaatatagcaagcacctgtgtttcctccacacaggaccagcggtgcttaacccttctcatgtttgcttcaggcctgttttgttttgtaagtaagaatggaaatactggaagtcaaggtacagtggcctttgacctcctccagtcacgcatttttctacattcttatgtgtataaactctcacccatccatgaacgtgactagtgtaattttgcacactaaaaataaatcttaatattctcataaggtacatatcatcctgcaatttgctcttttcactcaatattttattttattaattttttaaatatttattttatttatttatggatttattttgagatggagtttcattcgtgttgcccaggctggagtgcaatggtgcaatctcggctcaccgcgacctccgactcccgggttcaagtgattctcccgcctcagcctcctgagtagctgggattacaggtacacgccaccactcctgactaatttttttgtatttttagtagaggtggggttcc[132 bp omitted]gttttggttttggttttagagatgcagtcttcctatgctgcccaggctggagtgcagtggctattcacaaacacaatcatggcacaccacagcctcgaactcctggcctcaagtgatcctcctgcctcggcctcccaactagctgggactaccactgcaccccgctctattcctggtttttaatattacaaaaggtgctactatgaaaagtcttttcctctctctttatgcacttggcaaagtatttctctaagaactatgactagaaatggaatcactggaacattggatgtgtgcgtggtttacctgactatttaatgcccaagtgctttctaggattaagctacaaccggtaactgtggaagctccccttcttccattttttttttttttgagacggagtctcaatctgtcgcccaggatggagtgcagtggtgcgatctcggctcactgcaagctccgcctcccgggttcacgccattctcctgcctc[224 bp omitted]tgtgcaatggtgcaatcttggctccctgcaacctccgcctctcaggttcaggtgattctcctacttc[134 bp omitted]cggcctcccaaagtgcggggattacagatgtcagccatttcacctggccgtctcccatggttttgctgatacttgaaaccttgagtttttcaggctttctcttcaaatctcccccagtctattgtggcctttttggaccctccaggctcctgggttttgccacagggccacctcactgcactcatggtgctaggcaccctcgcctgcagtgcaccatcgctacccagtttgagcatgaaagaaccaactgtctctggcttcagactcttaacaattggaagtggaacctgccaggcactgcggctcatgcctgtaatgccagtactttgggaggcggaggcaggaggttctcttgaggccaggagtttgagaccatcctgggcaacgcagcaagactcccgtctctatgacaaatatataataaaataataaattgggagtgactctcaggtcctagcgctttccccccatagctattccagaaattccaagatcttacacattacgcagaaaaggcgcttatcaacattcttttgccagtcattaaaacaaccactcccacgataacaacaaaaaagaaaaagtggccgggtccggtggctcacgcctgtaatcccagcaccttgggaggccgaggtgggcggatcacttgaggccaggagttcaagaccagcctggccaacgtgatgaaaccccgtctccactaaagatacaaaaattagctggacatgttggcacatgcttgtaatcccagctactcaggaggctgaggtaggagaatcgcttgaacccgagaggcagaggttgcagtgagcagagattgtgccactgcactccagcctcggtgacagaat[258 bp omitted]gcttgcagtgagctgagattgcgccactgcactctagcctgggcgacagagcgagactccatctcaaaaaaaaaaaaaaaaaaaaggaaaattactacccaggctcattgacaagtgcaatattacagcttcaggtatggttggatccaggaacttgactcatgacattagcaatttttctcttgccatctctcaactctgctttcttctgggctggcttctcccagcctcacccccgaggtgggctcccctttcttagtggcaaggatgcccctcagtggctccaaattccatcctcccagctctatatcctgcgggtagggacacagagcctcctcttctcattctcactggctcagtcctgaaccaatcatagcaacccccagaagaggtagtgctctgattggccaggacagctgggggagggtggagtcagctaactactgagaccagaagtggggaaagggctgctccccaaggaaaattggggttgctggttgctaaggaagagagtcggcaaaaccaactgtgattgccactaggaaactcaaggcaaagaattctcaaattctttttttttttttttgagacagagtcttactctgtcacccaggctggagtacagcggcgtggtctctgctcactgccacctccgcctcccgggttcaagtgattcttctacctcagcctcccaagtagctaggattacaggcgtgcaccaccatgcctggctaattttttttttttttttttttttttttgtatttttagtagaggaaggggtttcaccatgttggccaggctggtcttgaactcctgacctcagatgatccgcccacctcggcctcccaaattgctggaataacaggcatgagccaccgcacctggcctccttggggttctgagttctcttacgctaaaatcaaggtgactgcaggattgcattccttctggaggctctagaggagaactactttccttgcttttccagcttctagaggcttcatttttaatttaatttaattttatgttgtagagactggggtctctctatgttggccaggctggtcttgaactcctgacctcaaaggatcctcctgccttggctttccaaagtgcagggattacaggcatgagccaccatgtccagtcttcagaggcttcttggattccttggctcatggccccttcctccatctccaagccagcaagggctgatggagtctttctcaagctacctcaccctggttgttcctattatcgatcaggtctacttctctgaacctggccttcctgcttccttctttttttttttttttttttgacagagtctccagagtcttgctgtcttgcccaggctggagtgcagtggcgtgacctcagctcactgcaacctccgccttctgggttcaagcgattcttctgcctcagtctcccgagt[137 bp omitted]gcctcccaaagtgctgggattataggcatgagccactgcgccgggccccatcttttcttttttggttaggtttggtttgttttttggagacggagtctcactctgtcactcaggctggagtgcagtggggcaatctcggctcaccgcaacctccacctcccgagcacaagtgattctcccgcctcagcctccagagcagctaggattacaggtgcccaccaccacacctggctaatttttgtatttttagtagagacagggtttcaccatgttgggcaggcttggttcaaactcctgacctcaggtgatccaccctcctcggcctcccaaagtgctgggattataggcatgagccactgcgcccagcctccttcttccttcttataagcaccctgtgattgcactgggtttatccagataatccaggatcatctcctcatctcaagatccttaatgtaatcccatttgcaaagtgctttttgccaactgaagtaccatatgcataggatttgggaattaggatgtggacatctttggacggggaggtgtcaatattcttccaagcacaatgggccataaagaggaacagacatgggtgcatttgtttatttcacaaacatttattgagcacctactgtgtactcacctgttctaggtcctgagaacacagcagaaaacaagacaggccagatacagtggctcaagcctataatctcagctctttgggaggcagaggtgggcagatcactagaggtcaggagttgaagaccagcctggccaacatggtgaagccccgtctctactaaaaatataaaaattagccgggtatggtggcaggcacctgtaatgccagctacttgggaggctgaggcaggaggatcgcttgaacccaggtggcagaagttgcagtgagatcatgccactgcactccagcctgggcaacaaagcgaggctctgtgtcaaaaaaaaaaaaaaaaaaaataggccatgcgtggcgactcacacctggaatcctagcactttgggaggccaagggaagaggatcacctgaggtcaggagtttgagaccagcctggccaacatggcaaaaccccatctctactaaaaatacaaaaattggccgggtgtggtggctcacacctgtaatcccagcactttgggagccaaggcgggtggatcatctgaggtcaggagtttgagaccagcctggccaacatggtgaaaccccatctctactaaaaatacaaaaattagctgggtgtggtaggcgcctgtaatcccagctgctcgggaggctgaggcaggagaatcgcttgaacctgggaggcggaggttgcagcgagcggagattgtgccattgcactccagcctggacaataagagcaagactctatctcaaaaaaatatataaataaacaataaataaaaatacaaaaattagccgggcgcagtggtgcgcacctgtaatcccagctgttcagaaggctgaggcaggagaatcacttgaacctgggaggcagaggttgcagtgatcagagatcacgccactgcactccagcctgggcgacagagtgtgaccccgtctcaaataaataaataaataaacaaataaaaaagaaataaataaattacccaatctcagggacgttctttatagcagtgtgagaacagaccaatacattcagactgcagtgagccgtgatggcaccactgcattttaacctgggtgacagaatgagaccctgtctctaaaaaaaaaataaataataatccttttttttttaaatcacaaaggtgaaaggaaaatcagcttctctcaccatagattgaaggtaactgaaaatataatttagtctgattgacttaaatggatcccgtagtgacggaaggaatgacaggtgggagagacttaacaaccactccctcgacccctcgcccctggcaggacccacttgagacttgagaaagacagaacagatattcaaaggggtcactgtgcaactgggcttccaggttatttcataccacgccaaacactctctgaagtcatattttgttttgttttttgtttgttgttggttttgagatggagtttcgctcttgttgcccaggctggagtgcagtggcgtgatctctgatcactgcaacctctgcctcccaggttcaagtgattctcctgcctcagccttctgaacagctgggattacaggtgcgcaccactgcgcccggctaatttttgtatttttatttattgtttatttatatatttttttgagatagagtcttgctcttattgtccaggctggagtgcaatggcacaatctccgctcgctgcaacctccgcctcccaggttcaagcgattctcctgc[134 bp omitted]gcctcccaaagtgctgggattacagtcgtgagccaccgtgaccgggtaatttataaaggaaagaggtttaattgacttggttcctcatggctggggaagcctcaggaaatttacaatcatggtgggacaggaagcagccttcttcacaagacggctggacaaaggagaaacttcaaacacttataaaaccatcagatctcatgacaacttactcgctatcaggagaagagcatgggggaaactgcccccatgatccaatcacctccctccctcaacacgtggggattacaattcaagatgagatttgggtgaggacacagaagcaaaccagatcactgggccttccaggctcaagtgatcctcccacctcggcctcctgagtagctgggaccacaggtgtgcaccaccacatctggctaatctttgcattttttttttttttttttgtagagatggagtctttttatgttacccagactggtctggaactcctggcctcaagtgatcctcccggcctcaagtgatcctcccgcttcagcctcccaaagagctgggattacaggcaagagccaccgtgcccggctaaaaaagatttttaaaatacattgactgatatttcagatgtgaggtttaaaggaaaatagataactgtggatatggggaaatggaagaaaagatgagaagccattggcacggatttgggaagcattacctgtctcttacacatggggaaacagaggccccgccatgaccatgactcaccaggtgggctgaaggtctttcttcaggaggagagctgaagggagctagaaaagttttcatcggttggctgcaggggctcacgcctgtaatcccagcaccttgggaggctgaggcaggtggatcacttgagctcaggagtttgagaccagcctggccaacatggtgaaacccatctctactaaaaatacaaaaattagcttgatgtggtggcatgcacctgtaatcccagctactcgggaggctgaggaagaggaaggagaatcgcttgaacccgggaggcagaggctgcagtgagccgagatcacgccattgtactccagcctgggcgacagagcaaaactccatcttaaaaaaaaaaaaaaaaaaaaaaagagcgtttcattagcattcccctatccctctgtgagtggttttctccctctcccttgctcatcccgagctgattagagcaagtgctctatgaagatctccagggaacagcatcccaggctatgggcaccatgcatgcaaaggccctggggcaggaccacacctggcatgttggaggaatagcaaggaggcccatgtggctggaatagagtgagctaggggtagagagggaggaggggaggggaaggaggggacgggacaggtcgtgcgggccgtcatgggctgcaggaaggacttgggtcttgaccttgagggaggtgggagccatagagggctgtggacagaggaggaacaggacctgagtcaggtgctcacaggcaccctctagtggctttgcagagaatgcactgaagaggcagggcagtggccaaggagagaccagtccagctctcagcacatgctgtgtgtctccggggcaagggaagtcactctatgggctcattttccttatcagctaaaaggggaactttaacagcaggcagagactcagaaaatgagcagaaggagctcgctgcctgagattcaggccaggcgtggggctgctgagttaatacttttaacaggtcaggattctgctcaccacactccgggaggtgggaagatgaggtcagccacacccccagctcaggctctgatgaagtcatcgtgacagatgggtaagtgtgaggacagctgtgggaatatttcccacctgtgccctgtgcctcctgcaaagatgtagatgagcaaatcaaccggcatttcacagtcagacacagctctcagcacaccgcgctgtctaggagcccttcctgcaggaagccctcccggattgcctgggccctgtggggtctccctggaagctgtggcaggggtggggggcatttcagggagataaggagcagagaggctggctagaccgagccatggtgaggaaagacagggcggacgacagaagtgctccacgggtgaagggacatgctgggccatcagccacataagtctgatttgaatcctgacccagattcccacttgctttgtggacaagtctgctcccttcctgggctttgttttctcaaccacaaattgagaaaagaaatctcatttgattgcttaacactcatttaagtgagcacctactgtgtgccaggccctgttttgggcaccaggaacatggcaggagaaaaatgggcccagacctgctcttccaggaccctcagtccagtagaggacctgaatgtatcaccgagctgttaaaatacaaggtgttagggctgggcgcagaggctcatgtctgtaatcccagcaccttgggaggctgaggcaggtggatcacttgaggccaggagttcaagaccagcctggacaacatagtcagactccaccaagacgggggttggggggggagagagagagaggagaggagagagagagaggagagaggagggagagagggagagggagagagagagaaagagagagagagagaaatgtccttgcctagtctagaggggcttcaggcacagtttgatcaaggggccccagtattcagtctccttcccggacttagctctgttctcctcccctggcttctgccacaaggcagatctcataccagtccttagcagatcccagctggtatttccccaggctggtgctgcctcctctgtagttctggactaagccccggggctggctctcatcagcccacactgagtcatgtcctgtagcagctgctcagaaccacagacatatctccctgttttggggcgttctctctgcccagagctaaggttcctgggagtagtcctttgtcaacgctggttgaacatgaggggataaataccctagcttttctgatctctgggtgcggcgattctcagctgttttctttctttttccttttctttttcttttttttttttttcagacagagtcttgctttgtcacccagactggagtcctgtggcacaatctcggctcactgcaacctcccaggttcaacctcccaggttcagatgattctcctgccttagcctcctaagtagctgaaaccacaggccctcaccaccacgcctggctaatttttgtattttctgtagaggtggggtttcaccatgttggccaggctggtctcgaactgacctcaagtgatttgcccgccttggcctcccaaagtcctgggattacaggcgtgagccaccgcgcccggctgccggtgtcttattgaggccatcagacaatgcaagagtgctgagtcccagcaccctgtccttgcagttttacaaatctctgaatctgctacgatcactgcatccatcttccagatgcagtcactgaggttccaaaaagtgaagtttcctttcctgcccgggatgactaaggacgctctatccccaggggcagcagaagatcgggctgccctctccccaaacacacccacccacccacccacaggggcacacacgggcacacacgcaccgtctacctccccagacacccggctgacacaggctggcgtctgcacggctgacacttgtaaatccaccctccttcgggggcaggctggctccttctctggcagcaggaagatagagggagttggtttagtggttggggggaaaggagtgcgcccctgaccccatgcccagcccccgaccccagggagggtgacagcccctccctctcttccagtgaccttgggaaagttccaggaggcccccgggcctggactttgagaggtgagcgctccagcaagattcgctcccctccttctgtccctgctctgggcccgcccacccactccctttctcaagcggccttggaaagggtcttgcagagacagacagatggcctggggacagatggcggacgtgtaggagttaccactgggagaggggtaagggggaggggagtgcgttctggcccccaagacgagtcccacaggctcctgcagaacagaataagccgcctccttcaagcccctcaactgggatatcatcgtccccccgcaaccaggatcccatcaccccataaacggaatcccatcccccatcccaaccagggtctcatcatccccgcaaacggagtcccatcgaccccacattcaaggttccatagctcccccaaacgggatcccatggcactgggccggggcagaggcccggagaagagggtcgctagctgcaggttgcacagcccggcagggtgcgaggcctggcctgggggtgcgggtgactctggtgggtctaggctccgcggggagacttgggcctggagaccccgccccgcacgcagatcccgcccgccccggccgcgggttccggggaagcgaaggcgccgccagcccgggctgtgggcagagcgcgccctctgccgggcatgatcggaaacggcgcggcggcgactcccggaccctcgggactccggacccgactcccacccggctgagctttaccgggttatagagcccccaactctggatcgatccccgacctcctaaggaaccgcgacactgggctgagctcccgccttgggctaaacctcaatcccagtagagctgggacctgggctgagaccccaactttggatagagcctctgatctgtctttgagccctggtcctgagccaagcctcaaactccaatagagtctccatcgacctgagctcccaactcagggctgagcccccctctaggctgaggtctgatacggaatagagcctgcgaccccttctaaatcccgactctgggctgagcctggaccctcgatagagtctccaactctaggctgaaccctaaccctgggctgcacccttactgtagacagagcccaatcccagcagaggccctattctcactaagccccatcacccagtaagcctgcattcccggccaagatcatccctcccccacccctaacacccactgaaccctagccctcccgagtcccaaccttcttatctgatacagaaaagagaccaggtgtggtggttcttgcctgtaatcccagcgctttgggaggcagaagcaggaggatcgcttgaggctaggagttcgagaccagcctgggcaacatagtgagacaccccctatctctatttaaaaaaataaaaattagccgagcttggtggtgcacacctgtgatttcagctacttgggaggctgaggcagaaggattgcttgaacccaggaagttgagactgcagtaagctgtgactgcaccactgcattccagcctgggtgacaaatcgagaccctgtctaaaaaaaaagaaagaaagaaaaaaggtgaaatcatgctaggctcagatgcctccagtcctcctgccctgatggggagacccccttgatgctggggttgcgagaggagctgtacacaccacaccaaagtcagacctaatcaggtcctaatcccatctctgcctcatctggctgtgtggcctggaacctatcccttcctccctctggggttccatttcgtcatctgtgaaatgggacagtcactcctgactctaccaccttgtgcctgtgtgacctcaggcaagttacttcctctctctgggcctcagtctcctcctccaaaatgaaataagaaggtgttttgttttgtttcttgaaacagagtctcgctctgtcgtccaggctggagtgcagtggcgcgatctcggctcactgcaacctctgcctcctgggttcaagtgattctcgtgccttagtctcccaagtagctgggactacaggcgtgcaccaccactcctggctaattttttcatatttttgctttattttttattttttgagatggactcttgctttgtagcccaggctggagtgcagtgccgcgatctcggctcactgcaatctctgcctctggggttcaagcaattctagcacctcagcctcccgagtagctgggactacaggcgtgcaccaccacgaccagctaattttttttttttgtatgttttattttttgagatggaattttgctctgtcgccccggctggagtgcagtggcccgatcttggctcactgcaacctctgcctccagagttcaagcgattcccctgcctcagcctcctgagtagctgggattacaggcatgtgccaccacacccggctaatttttgtatttttagtagagacggggttcca[131 bp omitted]tgaggcctgtgcctcggtcttcctgaatcccgtgtgcaggtcaggacacacaacaggccctcaacaatttgttgtctggcttcctggaggaagaagcagcgaggttgctatgggctccctaggccctagctgcaaccgggacccagagttgggctgcagggcggaaatggtgctgcaggggacctgggagcagctccagggcctggttcccaggactcacagctgcatcctccccgggggaccccagctggcgctgcgcagccgggaggctcctgtgtgtcctgcaggctcattcctacggaaatcgaggctggacctggggatcctctgatgaggtctccaggagccctccacctcaccccaaagattcatctatagccccacaaccctgggttagattcatcccttcttgtggcacagaactctgtatttttaaaattttaacttattttgatcttcttctttttctttctttctttttttttttttttttgtagagacagggtctccctaggttgcccaggctggtttcaaactcctgggctcaagggatcctcctgccttggcctcccaaagtgctgggattccaggcgtgaggcaccacacctagttggaatctgcattttaaaatggactctcagatctttctgacgcgaagggttccccgaggccgtactttgagaaacacgcttctgccgaaattcctattacccaggcgggtaaactagccccagaaggaggaaggggcccgtgcagaaccacgtggttggtctgttttgccttttggctctctggtctcttcctgttggtgtctctgtgcctccctccccaggttctctgtctgtctcgtactcttatctcttcccttttctgtggccggcacccccacgacggcctcgcccccgcatccgggccccttcgcgattccggaggaatcccccagagccgcctgaccccgcccccaggctccgccccttccccccacttcccccccgtcgcagtgccctgctcccattggccttttcgtacattgcccgccctgtcattggctaatccggagcgctcggcccgccccccaggcctggcaactctccggtcccttccgcgcgggcggggcgagtggagggcgtggcctgccgaggggcgaggcgagtggagggcggggccgcgctgcccgccccgccccggccccggccccggctccggcgctgctcccaccgccgcggcaacggccccggcccacggaggcggctggacggacccccgacggttggacgtacggactctgcttcgagagtaggtgagcgagcagtgccggggcgccccccatttcagcgcatctcgggggccacctggccgccctctgtctctcccgccccttaatgcttctgcaccccaccgcctgtccgtctacattcctgcctcagtttccgtctgtctctctgtcactctcgctgtataggttagggggagacagattgagtctcaattgccccccttggcgtggggctctgctctgggaccagcacccccatcccccatgtggactctagtggactctgccccctttaactgtagggccgcaggtgctcaggccagattccagaaccctgagggcattccaggcggtgggcagctgggccagccgtgcggaggtgggcatgactgtagcttctagctaaaccaggcatcggtccaggcatcggtggcggggagccaggcctaggccagcccgggcccacccagactggcccctaatgagctcccaagtggcctgtggggacttggcctcagttttgccagctgtgaactgggaccgtcgctgctaaggtaattggcaggtgatctgaaggacacctgccgcctcctggccttttctgtgaagtcgaactaggcccatttcctgggatgggaaactaaggcctagaaagaggccaatgcttccaatgtttgtccagggaagtggggacagaggcaggacagaatctgttttctctgcatcctcacatttcccagcaccttctctatggaggggggaagggctggtggaggagcagccccaggtgtaaacaggccgccagagtttatttcctgagccagtcccagctcagctggaggcgatgaacgccttgggaggccccaggggggccagcccagtggtggcggagcttggaccaatctaggtttgagctctgccacccgcatgatatcttgaaccagtttttcaattctgcggagcctcagtttcctcatctgtaaaacaggagtgggtcgtaactccccaagttgagggctgctgggggatcagatgcaggaatacaggccctgctcataacctgcctgactctcgctgtggctctgccccagtcacactggcctcctcctgtttctccaacaccccaggcgaggtcctctctcagggcctttgcatgggctgtgccctctgccactacggcaggtccgagggcgccaactttgaaacataacaagctccctggatgggccggacccaggacctgcacaggcaagggctgggaggggcagaggaggggccgctcagggacgctgtacctatggaaaccgtgaacaaagggctgtctccagccacacaaacacctgggtgaatcgggcactggccagaggctggagcagcctgggatacaggtggtgggtgagtgcctggacccctgcagggaatatggggccgggggggggacttgaaccctgctccaatggtggggtggctctgcagacgggtgcaggtctgaggccccgcggtacggcccctcccactgtgtggccttggaccgacggtcaggtgcccccagagcctcagtttcctcatccccgttcccccaggggtcagcccaggtgggtgaggggtcttttgattgcttgacaattcagtatggtgggttccggaggcctcagtgtccctgtctgtccaatggggccacgaaagggtgccttgaggacaaaactccagccgttgacaggggaacactcctcccagagagacgtcaacgctaaaaaatgactcacacttgcccaggtacagctcaggtgttacagacggggagcagggcaaggaggcagagcgagaggcaggaacggcccagttccacagcatgcctgccccttcccagcatctcccgacacccctcagcagatgacctccctggaatcacacccgctcgagctttgacgcagggacctctggcagagttcttgggatcttgtaaatccccagcttctaggcctcagtttccccatctgtccaatggggctggtcatctcctttttcttgtggggctgagataactgtggggagggagggtgctttgaggggtgggggagattcaacaagatattgttaaaagcccgaggaggggattacaggacacagtacttctagaagcttcctaaggcttcgatccttcccctctggggtgggctctgggagagacgagacttgaaccccaaatgtgccattgactaggatgaggaaaggattgcactaggttaaaggctgggttcaaattctgattctgccacatcactgctttataaacaggcaagctcctgaccctctgtgactcagtttccttataaccaaaaacttgcaggtccatctagagaatttcccagcctgggcaacatggtgaaaccctgtctctacttaaaacaaagaaaaaaaaattagccaggtgtggtgtcgcaggcctgtagtcccagccactctggaggctgaggtgggaggatcacctgagcccagggaggttgaggctgcagtgagccgagctcatgccactgcacttcagcctgggcga[136 bp omitted]gagggcaaaaccctgtctctactaaaaatacaaaaatgaggcgggcgtggtggtgggtgcctgtaatccagctactcaggaggctgaggcaggagaaacacttaaacccaagaggcagaggttgcagtgagccgagattgcaccactgctctccagcctgggttgacagagtgtgagactccatctcaaaaaaaaaaaaaaaattaaaaatatacacataaaataaataaaatagatgggggatctgggagggcttcctgaggaggggccatgtaaacccagacctggatgacaagaaggaaacagccatgtggagacctgggagaagagcagctcaggcagagggcacaggttgtgtaaaggccctggggcaagatggcgcctggcatggtagaggagcagcaaggaggcccgtggggctggagcagtgaggaggaggagagagggaggaggggagggcagggaggggacagggcagggtgcgcaggatcttatgggctgccaggaatacttggctttgaccccaagggaggtgggagccatggagggtggtgggcaggggaaggatggaacctgactcaggtactcacaggcacccattggctgctacagggaggacagacggggggcatggggatagatggtgctgagggacgaggggaccaggatggaggctgtgggggagataagaagtgggttgcgttaggccaggcagggtggctcatgtaatcccagcactttgggaggctgaggcaagtggatcacctgaggtcaggagttggagaccagcctgaccaacatggtgaaaccccatctctactaaaaatacaaaaattacccaggcatggtggcacgtgtctgtaataccagctactcaggaagctgaggcaggagaatcacctgaacccaggaggcggaggttgcagtgagccgagatcacgccgctgcactccagcctgggcaacagagtgagactctgtctcaaaaaaaaaaaaaaagtgggttgcattgggacacatttaggggctggatgcacctcctgccaggtgatcctaggcttctctgcactctaataatttattgcttgggctgaggcaagcctgtcccctcctctgcagagtcatgggctgtgggtagctgataattcatgtttggccctcgaaccctttctccagtggaaatctggccacagtggaaagtgtccaggctccccgccacaacccagcaggcagctggcccctgcccatccatggggtggtcctgagggtgctggggaacccagtttgagaacaactgatgtcacccccaacttgggccaacagattcccctctctcttttgccataactaaaatggacactggcgaagtatggcggctcatgcctgtaatcctagcattctgggaggccgaagcaggaggatcgcttgagcccaggaggagaccagcctggccaacatggcaaaaccccatctctactaaaaatacaaaacttagccaggcatggtggcaggtgcctgtaatcccagctatttgggaggctgaggcaggagaattgcttgaactggagaggtggaggttgcagtgggctgagatcgcgcaacagagcgagactccatctcaaaaaataaataaataataaaattggccgttcacggtggcttatgcctgtaatcccagcactttgggtggccgaggcgggtggatcacctgaggtcaggaattcgagaccagcctgaccaacatggagaaaaccccgtctctactaaaaatacaaaattaaccgggcgtggtggcgcatgcctgtaatcccagctacttgggaggctgaggcaggagaatcacttgaacccaggaggcagaggttgcagtgagctgagatcatgccattgcactccagcctgggcaacaagagtgaaactccgtctcaaaaaaataaaataaaaataaaataaaatggacactggccaagtgtggcagctcacgcctgcaatcccagcactttgggaggtcaaggcgggaggatcacttgagcccaggagttcgagactagcctgggcaacatagcaagacgccatgtctaccaaaaaaaaaaaaaaaaaattaaccaggcatggtggcacatacctgtagtcccagctactcaggaggctgaggtgggaggatcacttgagcccaggaggtcgaggctatagtgagctataatggtaccactgcactccagcctgggcaacagagtaagaccttgtcttaaaaaaaaaatgaataaataaaaataaaatggacaccggcttgcaagtcctgagtcatggatttttttttttttttttttttttttgagatagagtctcactctgtttctcaggctggaatgaagtggagctcactgcaacctctgccccccaggttcatgcgagtctcgtgacgcagcctcccgagtagctgggattacaggcgtgtgccacacacggctaatttttgtatttttagtagagatggggtttcaccatgttggccaggctggtcttggactcccgacctaaggtgatctgcccgcctcgacctcccaaagtgctgggattacaggcatgagccaccacgcccagcctgtgagtcatgggtcttaaagggcttggtgcagtgggaccctgggagtcggtgggatgaggcctgggatcactggcctcggcgggaagaggcctgaggccccccctgggcccccggactgagtgcagccggggctgagacaagacagatggagcggctggcgtgcacctgcagagcagatccatcaattattgacactctgtgaggtgcatgaagaattcatgggacaggggtggggacggcagggacttgtgacataattgcagccagctcaccagagccacctcctgtgttttcaggaattttgccatctggtagttaaacgcagccattatttaacgtgggagaatataaacttatagttaaggctgggcgtggtggctcccacctgtaatcccagcagtttgggaggccgaggcgagtagatcacttgaggccgggagttagagaccagcctggccgacatggccaaaccccgtctctactaaaaatacacaaatttgtatttttgtacaaatacaaatacaccagctgggtgtggtggcatgcacctgtagtcctagctacttgggaggctgaggctgaggcaggagaatcgcttgaatccgggaggcagaggttgcagtgagctgagatttggccactgcactccagcctgggagacagagcaagactccatctcaaaatacatacaaacatacatacatacataaacttatagttaaataaagtacatttaagccaggggtggtagctcacacctgtagtcccagcactttgggaggctgaggcaggaggatccgtctcaaaaaaaaaaaaaaaaaggaatatagggagcaggggaagagtcaagggagccagggagttggtgcctggtcacccattttgcagatgggaaagctgcccccatgcatggggcctgccaagggtcacagcagggagacctcagagctgtggacggacctggacagaggctgtggacagggctgaggcctcctggctgttcctgtaacaagcgtgacacagccctgccccagggcctttgcacaggctgtgccctttgcctggagcatcttcccgcagaccctgtcattgcaggcccagttcaactggcccagcctctccctagagaggccctcctggttaccctgaacttcatcccccacccccgtggcccatatctctcttcctgaaattaacttgtttgtttctatttattggttaccggcacctcctccttccagcaggggaacagtttttgcacccaggctggagtgcagtggaacaatctcgactccctgcaacctccgcctcccaggttcaagcggttctcctgcctcagtctcccgagtagctggaattacaggtgctcgccaccacgcccggccgactttttttttttttttcagttgagtccgggtctcactatgttggccaggctagtcttgaactcctggcctcaattgatcctcctccctctgcctcccaaactgctgggattacagttatgagccaccgcacctggccaatcattgttttaaagtgtacaatttataaccagaaagttatgtgaccatcataaatttctggaatctctaattccagaacattccattaccactcaccccaaaaaaacctggttcccaatttagcaatcgctttccattttcccctcttccagtttccagcacccgcgagtccgctttctgcccttgtggacaggcctctcctgaacatttttttttttttgagatggagtctcgctctgtcacccaggctggagtacagtgacgtgatcttggctcactgcaagctccgcctcccgggttcacgccattctcctgcctc[134 bp omitted]ggcctcccaaagtgctgggattgcaggcgtgagccggtgcccggcccttcctgaacatttcatagaagtgggatcacacactttgtggccttgtgtgtctggcttctgtcactgggaatgatgtcctcaaggtgcatccacgctggagcttgtgtgtgagcctcgttccttttatggctagagaacattccattgtttggaccgatctcattttgtttattcattcacccattaatggacatacggacatttgagttgcttccacttgcaggctaccctgggtcacgccgctgtaaactgtgacgtgcaaaacaagtgtttgcgtggtgtatgcttgtgtttctcttgggtagatcccccaaagtggaattgctgggtcctatggtaactgtgtgtttagatgtctgaggagccgtcggactgggtttttttgttttgttttttgttttttgtgacggagtctcgctctatcacccaggctggagacctcggctcactgtcactgcaacctccacctcccgggttcaaatgatcctcctgcctcagcctccagagtagctgggattacaggtgcctgccaccatgcccagctaattttttttgtatttttagtagagataaggtttcaccatgttggccaggctgatctcaactcttcacctcaggtgatctgcccacctcagcttcccaaagtgctgggattacaggtgtgagtcagtgcacctggcttttttttttttttttttttttttccttttgagacagggttttgctctgttgctcaggctggagtgcagtggtgtgatcatagctcactgcagccttgacctcgtgggctcaagcgattctccccctctcagcctcccgagtacctgggaccacagacccgtgccaccatgcctggctaattaaaaaaaatttttttttgtagagatgggatctcgctatgttgcccaggctggtcttgaacttcccagttcaagcaatcctcctgccttggcctcttaaagtgttgggattacaggtgtgagccaccttgcctggcccagatgattttgtaatgaggaggcagcttggggtctagaaagccagggccttagcaaggcagggatgggatctgttttgatgcctgctgtatccccagtgcctctgtggtctcttctgcaaagcaggcaacctggccagtaccaggtgggaatgacgaataggcacaggtcgctggctcaggacactggggtttggttacaagcttctgccccaggacagctggtgctccataaatgctcgttgagccactgaatgggtgttaacacctgaatcccagaagctgtagcaggctgtgtgtgtttgtgacgatggcagggtgccctggcatttggagggcgatgcccctaggccccaggcagtccctaggaaggcccctgccctgtaagggctgatgcggccgctacaccgcctcctgcaggaaggaagacccaggtttattttggtcctcggcctgttcccctgggagagcagtcatcctcctgtctggctgcctggatgggagcgtttctggcagaacaatgggtcagggaggaggaaggggaaggccaggcagctgggccgccccaggtgtcagcaggtcccggggctgccccggccgtcttaggagtgtgggggccaggaagggaggccacagctgcttgccccccatccctcttcctgttggccttgcagggggcgggggttgctcttgggagcccaggcccttcctgaatctgtaaacaggcctgactcccgtccggaatcaacttcttcagcctcaggactcacagatgggaaagtcaaggcccagcgaggggcacagccctgcctggggtcacggagctcccgagatgggcagaaagatgtgggctccagggccgatggggtccaggggcctcatccccagatgcagagaaaggccttttcctcttcgagtcccctcggtttattcatctatgaactggggaggctggacccaggggttcgggagtttcctcttagaatctgcaaacatccttttttttttttttttttttttgagattgagttttgctcttgttgcccaggctggagtccagtggtgtgatctcagctgactgcaacctacgcctcctgggttcgagcgattctcctgtctc[134 bp omitted]tggcttccgaaagtgctgggattacaggtgtgagccaccgcgcccggccagcttttttttttttgcacagggaatctcactgagatagaactaggtctgcaagttcacagagctgaggtgggcacggaagggcggaattccaggcagtggttgcagcctctcgtccagaggaagctcacagcttagggggcattgcggtttggtcacaagcttctgccccaggacaaagttcgttccgatcttccccatatttcagatggggaaactgaggcacattgttaagttgcttgctgcagaggccagagctgggagcaggccctaaatatcagggttgccctctaagactcacggccagttgagggcgttaggtggggaaggcacagggagttggggttcaagggcgttgagagccagtggttactgtattgctgtgtggtcttggggaagtggctcagcctctctgagcctttgtggtctcttctgcaaaacaggcaacctgcctagtacatggtggcgatgacaaagtgggcacacatcgctgactcagggtctgccacgtggcactgagtcaacagcacccctcttctggcctaggcctgtgcagagccagggtctggtgaccgaggtcggagggcaggggcggcccatccagcaattcccgtgcctgccctgacctcagagggcggccgagggtttggaacttctcccggagtctgaactcacacaaagaccggctttgtgggggctcctggggtaggtgggtgcccacatggcattccaaggctggcagcctggcgctggggtgggagtggaggctgagcagggtctggggcagtgagagagaccgggggcgggtctcaggccctccctcctccgccagttcttccacactcccctcttcattcagcagatgtttctggagtctgcagggacaccgtggataaggaattgggcccatgacctcccctgtggcctggggtgaggcagaccagttggggtgcagagctggggagcagaggagcaatggggatgcctggggaacctgcggctcagaggaggcagagacttgggggccaaagtgatggggatgtatagtttaccagggaagaggcaggggcttgggggccaggctttggggggtgtataggagttcaccagggaggagatggggccttagggtattgaggtccacagggaagagtcagggctccaagtgaggtgtggagcttggtcctgggagctttgaggagctgtcagcttgttctcagcaggtaagggctatgccctactctgagatttaggaagaattccggagctgcaggaaggaggtgggtggagggggaagctccagggctggggaaactgggcaggctacagggcagggtggacagagaaaaggagcagacagggacagggggatggttctgcagtgagaggcctggcccttatgcctcgagagctggccaggctctcaccttggccacctccccagtcccagcctggacgggggctgtccaagtcaatgtttccctgttggaggaatcatcggagccatgccttcccagaaaccccacaaatggccccctgtgaacccatcaccccctggctcactcggggctgaaggccttggacatgcctgttataaaccctgtcgggggccaggtgtggtggcgggcgcctgtagtcccagctactccggaggctgaggcaggagaatggcgtgagcccaggaggcggagcttgcagtgagccgagatcgtgccaccacactccagcctgggcgacagagggagattccatctcaaaaaatagtaataataataataataaaataaataaataataaataaaccaaccctgcgggggcagtgggactggaggcactgccatagtaatggggctcctccaccctgaacagccccgggtctggggctcacttggaaccccacctcatggagctgtggggtgagggtggggagtgttgagctggacctaggggatggaacggaaccccctgtaacaatcaccttgagccccttctcagctcatagcaaggatatgatgggtttgagggctggcatcagaccctacagatagtggggttcagaagggccttctctgtttgtttataataataatcataataataaatacaaaataaaatttttgattttttttttttagagatagggtcttgttatgttgcccaggctggtctcaaactcctggcctcgcaattctcctgcctcagcctcccagagcactgggaccacaggcatgaaccacaggcttgaattataggctgcagtgcggtggcatggtcttagctcactgcaacctccgcctcccgggctcaagggattctcctgcctcagcctcccaagtagcggggattgcgggcacccatcaccaagcctggctaatttttgtatttttagtagagagaaacatgggtttcaccatgtttgccaggctggtctcgcactcctaacctcgatctcaggcgatccgcctgcctaggcatcccaaattgctgggattacaggcgtgagccactgcgtccggcatgacactttttaaagaaacaaattccgttaggccctctggggtctgtggtgttgtcacctcttctgtgtgaggagtgccccaacgtgcaaaactgagggctggtctgtgtcccccgcaggccatggacaccttcagcaccaagagcctggctctgcaggcgcagaagaagctcctgagtaagatggcgtccaaggcagtggtggccgtgctggtggatgacaccagcagtgaggtgctggatgagctgtaccgcgccaccagggagttcacgcgcagccgcaaggaggcccagaagatgctcaagaacctggtcaaggtggccctgaagctgggactgctgctgcgtggggaccagctgggcggtgaggagctggcgctgctgcggcgcttccgccaccgggcgcgctgcctggccatgacggccgtcagcttccaccaggtggacttcaccttcgaccggcgcgtgctggccgccgggctgctcgagtgccgcgacctgctgcaccaggccgtgggtccccacctgaccgccaagtcccacggccgcatcaaccacgtgttcggccacctagccgactgcgacttcctggctgcgctctacggccccgccgagccctaccgctcccacctgcgcaggatctgcgagggcctgggccggatgctggacgagggcagcctctgaaccccggcgccgcccaaccgcgcccctcgcgccttttggggctctcctgctgggcgcgggtggggtttgtgggtttttttccacctcttttctcccaatcggactccggccaaactcccctagacagatgggtgacctgtctcctttgagaggatgctgaggcatctgtagcagctgtttcaaacaccaatgtcacctctcctcctggcccccgcccaatggggagaggaatttggggccctactctggggaccacctttcacccgtttgtactttctgggccacgccgacccctgggtcgcttgatgtaaaagccaaaagctgctgcctcccacttggatcatgtcgcctgggattttcatccctcgcacaaggactacgggttcacacggtgaactgggggaagggaagtgttagggggcaagtcgcggcacccccccttccataaactcacgtcctaacccccaggacctcagaagatgatctgatttggaaataggatcattacagatggaattagttcagatgatctcatcttggagtagggtggg[187 bp omitted]gtggcacatgcctgtagtcccagctactcgggaggctgaggcaggataatcacttgaaccaggaggaggaggttgcagtgagccgagattgtgccactgcactccagcctgggtgacagagcaagactctgtctcaaaaaaagaagcgggggagtgggggattgaggccacgtgcagtggctcactactctaattccagcactttgggaggccgaggcaggaagattgcttgaactcagaagttcaagaccagtctgggcaacatggtgagaccctcgtctctacaaaaaaaaaattatcgtggtgggccgggcgtggtggctcacacctgtaatcccagcactttgggaggc[134 bp omitted]gaggcaggagaatcgcttgaacctgggaggcgcaggttgcagggaggcggaggttgcagtgagccgagattgcaccactgcacttcagcctggtgacagagcgagactcgtctcaaaaaaaaaaaaaaaaaaaaaaaaaaaagtgactgtggtggtgcacacgtataatcccagctacttgagagatgacgagggaagatcacttgagcccaggagttaagaggctgcagtgaccgatgatcatgccactgcactccagcttgggtgagagtgggactctgtcttagaaagaaaaaaaaaagtatttggacacagacatgcatgcaaggaaggccaatgatgccggccaccaccaggagctgggagaggcccagggcagatccccttcagccttggagggacctagccctggccacaccttcatctcagacttgcggcccagagaactgaatgagaataaatgtgcgtgaagcccctcagtccacaggatgtggtactggaagcccccactcaagaaggctccagtgaatgctggcacgttcagccaggatgcctccgtgaagctggagacctctgccctgggtcgggaggggaaactgctccaatccagggactgccacatgggaggggacggagcgtgcccacctcccaggggtgaggggggacccacctgagatgtgtgcacattttatttatttattgttttgagacaaagtctcgctgtgtcacccaggctggagtgcagtggtgaaatctcggctcattgcagccccttccttccaggctcaagtgatcctcccacctcagccccgggtagctgggactacaggtgtgcacgagcacacccggctaatctttgtattttttgtagacagaaggtctcaccatgttgcccaggatggtctcgaactcctgggctcaagcgacctacctacctcggcctcacaaagtgtgcacattgtaatatcgtgatttcatatttggagaatcagcaaccaaccagccaaccatgttgcttttataagacagagctgagaaagcaaagcttggctgtcgtcttggctctggtaccacccacgagatgcgggcgattctcagctcagggcgtggaggcgtggtgtgggggagtctatttgccatttttgtttgtcagcagggggcaggggttctcaaagattgcaaaatgctgctgcaggtcaggaaggttattttgggtgcctgtgggggaggtgaaacaaggtcccatgactgttttgcagaaccttgtctgtggagggtagaggttgcggcaggggcctgtgggccttacttggtgagaaggtaggtctagctggctccattcagtatttgagacatttggaatttgtctgcatttaaaaccaagagatcacacacacctgtctggatttggagtttctcttgaaaactcgccagtccggccgtctgagcctgcactgacgcctggtgaagctgtgcaggggccgcccctctccctttcaccacagtcctctccactccctttcgcctctccctggcctgctgcactcactgataggaaattctgaccccagactcggagcagccttcccgtggttcggtttttgcttccgcgaaaaagccaaaggccttggccagagagccagctgttcctacctctaccccacgcttccaaggcaaccttctccacttatcttaggccgagagacagctcttcaagaacgtacatggatcctgattttctcacgaagtcccgatggaaccctgtgctgttgagacatcagtgtgtaaaactctctgtgtccctgttgggctgtccagacagtctggactcttgtaaatttgagatttaattaaaggaaacaaaccaaataggactgcggaacaatttaaataaaagcacacaccagcctgggcgcagtggctcatgtcagttaaacctagtgctttgggaggccgaggcaggaggatcacttgagccaaggagttcaagaccaccctgggcaacatagcgagaccctatctctaaaaatatatatatataaggccaagtgcagtggctcacgcctgtcatcccagcactttgggaggctgaggcaggcagatcacctgaggtcaggagttcaagaccagcctggccaagatggtgagaccccatctgtactaaaaagtacaaaaattagctgggcatggcggcgggtgcctgtaatcccagctacttgggaggctgaggcaggagaatcacttgaacctgggaggcggaggttgcagtgagatgagatcgtgccactgcattccagcctgggcaacagagtgagacttggtctcagaaacagaataaaaaaataaaaaattatagccagtcagggtggcatgcacatgtggtcccagctatctggaaggatggcttggacccaggaggttgaggctgcggtgagccgagatcgcaccactgcactccagcctgggtgatggagcaagatcctgtccaaaaaaaaaaaaaaaaagcacacatatgcacacgtaaggtcagaggggaagctcctgtgtgtcccgagatgccctgatgtatgctggtgcatcaggccacccgggcatcatccttgatgacagccagggatccagaagctgtgggcgaatcccagctgaccaggagagagtccccctaccttggccagggtactggtggtaggcactgtttcccacggccttttctgcacaggaggccctggcaaccctgtcgtgctcatcttctgggccccgtggagcctcagagtcaagagctggaaagcctcctggccttggcgggggggtcttcagacctcagagcactgccattcttggtctaggggcccttcccgctgatgtgtgcggccgtcagtcctttcctcatgtggtggcatcaagtgtgtgctgggaagtcaaggctggctggttctttttcttttgagacaaggtgtcactctgtggcccaggctggactgcagtggcgcgatcttggctcactgctgccttggactcctgggttcaggcgattctcctgcctcaggctcctgagtggctgggattacaggtgtgccccaccacacctggctaattttaaaattatttattttttggtagagatgggggtcttgctatgttgcctaagctggtcttgaactcctggtgtcaagagattctcccaccttggcctcccgaagtgcggggattcacgggcgtaaaccatcctgtctggtctgtttttgttttttagtcact[131 bp omitted]aaacgctgtctctatcaaaagaagatgcaaaaattagccgggcatggtggcgtgtgcctgtagtcccagctacttggaaggctgaggtggcaagatcgcttgagcccaggaggtggaggttgcagtgagccgtgttacaccactacacttcagcctgggtgacaggagaagaccctgtctcaaaagaaaaacaaactaagggaaaccaatgccccaggctgcagagagcaggtcggccttggaacatcctcccgcgctggggcctgtggcagccacagaaacccgggtgtgaattcacaacatgtgggggacccagggacagcgagtgccaaggggggaagggggcaagttcacatacagccaccttgggatctagcgctttgatgcctgcagagaagtcccacccagagacaccgcccacccgcccacggtggggcagtgtcagccgcgtctgagctcctgacccgcaacggccagccgggagggcccaggctgtggggttgctttttaatgttcttatttatttaaatatgaaaaaacatttcatctcttcccagttcatctgaaaggaggtcccctgggtaaacataggaaagcagttctgcaggctcatgaaggatgctcggctggaggtcggggggagcatggctgctttccccagcatagcccccatgttccccaccctctttgtgccccggatctgcgatcctgagtccagaagagctcagcaggaagtgggaactgagaagctgttgggagccaggagggccctggaccctctgttctctgccccagggcttcagccaccctgcaagcccctccggacaaggcaacgtcagcccaggtagaaaacttaagagtccctcctagaaaaccagtgatgtgctggccctttcagggacacaggccccttcagcttcaccggagatgagaaggtgccacccgcaacagggctgctggtcacagctcagtgcgcgatgccttggccacaatcaccagcttggacagctcagctttgaatgccccgggcctgtgagccactgcaagaaagaaacacatggttgggccctcaacattgaaaattctcagaagtccggaggatttggggtggggcccatggtgggggctaagcaggcaaggggagcagtctccaaagcagactcccatgtgaaaaggccccaggcactgaaagtcttacgggtgacagacaggaaaacagtgatgtggagggtaaggtcggtggggctaacatagatggcaggcagcaggaagccacagaaagacctgaggtgggaagaaccctggtcatttgtgccatgttgtcaagaagagatgcagaaaggggccagaagaagcccaggaaggagatgatcccggcctgaacaggatgcagggtgggtcaggctgcaagacctcctgctcagtgggtgaacctgtctgaggccctcatgacacttctccagcagggtcagaactctggcttccactgcttcacccaagtctcccggccctacctgctgtgtccactcccttggctcccacccttgccccagctcggcgcctccgattcctctttctgcttagcattggcgccatgcagctgaatgtggcttgaggacaccggtgctgctcaggcaaccgaagaaggaccctgatgtttcccagtgacccctgcagcctcccctcggcatgccacagtcccaacctcaaagccctgatggtttctactttgttttatttcatttatttattttttaaaatttattattttttttgagatgagagtcttcctctgttgcctaggctggagtgcagtggtgcagtctcgactcactgcaacctcctgctcctaagttcaagagattctcctgtctctgcctcctgagtagctgggattacaagcatgtgccaccatccttggctaattttggtatttttagtagagaaggggtttcaccatgttggctaggctggtctggaactcctggcctcccaaagtgctgggattacaggtgtgagccaccatgcccagccctgtttattgtttttgagacagagtcttactctgatgcccaggctggagtgcagtggtgcgatcatagctcaatgcagcctcgacctcctgggctcaaataatcctcccacctcagcctcctaagtagctgagactacaggtacacaccaccatgcccggctaattttttttctttttgagacagaatcttgctgtcttccaggctagagtgcagtggcatgatctcagctcactgcaacctccacctcccaggttccagcaattctcctgaatagctgggattacaggtgcgcaccaccacgcctggctaattttttgcatttttagtagagatggggtttcattatg[141 bp omitted]ccaggctggtcttgacctcctgggctccaatgatcctcccaccttagcctcctgagcagctgcggtaacaggcatgagccaccgcgcccagctaagataaagttctagtggcacacagccacacccacgcatggacatactgtctgcagcagctttgtgccacaatggcacagctctagacagaacccacagtgccacaaagctgaagatattgacgaggtggcctttatagaatcagtttgtggatgcctggtctacagtctccaggacccctatggctgacccccctctccaaactgccccgattgcccacccttggatgggggtggcgtcacctctaccccatccccatctttccgtacctgctgttttggtcacttcaaattcctcagttttcagagggacatcactttccctttcaaatgcggctttagactgaaaaagaatgagtggaaactttaccagggccagttcaatgctcatcattaggaaaacgattgagtttgctttccagagaagcacagactaaagctttctacttttactagagatggagaggagacttttttgtttttgagccaggacctcactctactgtccaggctggaatgcagcagtgcaatcatagctcactgcagcttcaaagtcctggactcaagtgatcctcctgctgcggcctcctgagtaggtgggactatgggtgcatgccaacacgcctggctattttttttttacttttggtagatatagggtcttgctatgttgcctaggctggaatcaaattcctggcctccagcaatcctcctgcctcagcctcccaaattgctgggattactggcgtgaaccgccgcgcctggcctggagaagtcttttctggcatatacaagagaagccagcagcaacaggttaccaaacccccgtgcccctggcctgggggcgtctgtgtgccaggttcctgcaagttacacaccctacctctgcaggattcgctgtcccctctcctccctgtccccatggagccctcttgtggcaggacatctcacagctgccccagtgcacagaagccacacccggagcctgccccactccaagatactcacgtaggccatggcgtactcaatctcagcgccccgcacctctgccttgaactgtgtgaagtacagataggacttcccctggggcctgcagaggaagagggggcgagggagtcaggccaggcctgctgggtctgggtctgtgtgccctggaaggagccccgccagggactcgggctggggtcagcaggtctcgtgcctgcttctcaacatggacgccattcccgagcacgagcacctgctgactgggaaggatggatggggccctctcaacagcagaccctctttcttttgtgccagaatttttttttttttttttttttggagacgagtctcactctgttgcccaggctggatggcaatggcacaatctcactcactgcagcctctgcctcctgggtttaagtgattctcctgccttagcctcccttgtagctgggagtacaggcacccgcgaccacatctgactaattttggtatttttagtaaaaacatggtttcaccatgttggccagcctggcctgaacccctgacctcaagtgatccactcgcctcagcctcccagagggctgtgattagaggtgtgagccactgtgcctggcccctttgtgccagaatgttcttccagctcattcatagacacgcctctctcccctgtgggctgggagctgctctgggacaggaccccatgtccattcactgcacatggcttcttggttgctgacagcaatccaggtactacgacgggggctggggctgggcaatgagaggccagtaaaggcttctcagagggcattgactaggaagtacaggagttaacttaagaagtggggaggatcatctgcccaggtctctagaaggctgctaacggaggcttctaaggaactggagtggcagaaggtgtcggaaggtgacagcaggggatgatggcatctctggtgtgaagagagtgtgatggggatggaggggcagcaggggggccatttctgtggaagccctggctggggttctatgtgcatgggtggggcgggggtatccagggagccctagattcttctttaagccctagcactgccaacagccctggtcagggagggtccagtcactgtctgagatgaggaggcctggggtggcaggtctccggggctgagcatgcccctggggagcttttgtgggggttggacaggaggattcaggctcaaggtgagcccagccaccatcccaactgctccagacctgcacctgcccagatgccctctggggagctggcactcaggggtccatgcagggcagtggcctgcagacagacgatggcgaccgtgggcttccccaagactacagggcggcctctgcagggtctctctgggctgatggggcctatctcctctcaatgaccctcctgatgcctcctggggccttggcctgcctgtgatgcagccagttccatggagtgggtgagaatctccccagaaacacctgctgtttgtaaagcgccccgcagggcacggcgggacaacacccacacgaggcagcaaatcacaccctgtccttcagttaaacgtcgccactccctgatctctgcctcccatttgtcaacgtgctttaacctgaccgcagtggtggagctatagcttggacttctccctccaaagtgtctgcacaaaataaaggctcaagaaatacccactgtttgggctgagacattctgggccaaggatcagggaagaagggacaagattcctgaagcccccgaccccctccccaccggggggcctgacggcttccttcccttcatgaccttgcccagatcgagctgggatctaggcagtggggttacgagaatgagtggggcgagtggagccgggataagcccataaaccatgagcctgacagaggatggcggcaggggcagaatcgggcggtgtctggggagacttggggaggggctgtggacccagatgcatgtgtgttcgggcaggtggaagagagtgcacagcttttgtctgattcccagatgtctgcaccccaagaaggctatgagccatcaggctggtccttcagagaacatgctggtaaagacctgcctgaggggaaacagctggggccccttctggtgggacacattccccgggagatagcatcatccaaacctccacagccactaccccacagactcccacacctgccacctgcctagctcgtccccagcccagacctgcaccagctccgccagttccaccaggactctgcccagcaccttcctcctcctcctaccccagctagctgattccacagcctccaatctgtgccctcccctcctccctgtcctcattttacacagcctccagtctgtgccttcccctcccactccgtcctcattctacagcctccaatctactctccccaccccactccatcctcattctacagcctccgatctacattccccacccacctcatcctcattctacagcctccaatctaccctccccacccgtcctgtcctcattctacacagcctccaatctaccctccccacccgtcctgtcctcattctacacagcctccaatctaccctccccacccaccccatcctcattctacagcctccaatctgtgccctctccacccatcccatcctcattctacacagcctccaatctacgctcccatccaccccatcctcattctacagcatccaatctactctccccacctaccccatcctcattctacacagcctccaatctgtgccctctccacccaccccatcctcattctacacagcctccaatctaccctccccaccccatcctcattctacagcctccaacctgtgcactctccacccaccccatcctcattctacacagcctccaatctatcctccccacccaccccaccctcattctacacagcctccaatctaccctccccacccaccccatcctcattctacagcctccaatctaccctccccacctcatcctcattctacagcctccagtataccctccccacccaccctgtcctcattctacacagtctccaatctgtgctctccccacccaccccatcctcattctacaaagcctccaatctaccctccccacccaccccatcctcattctacacagcctccaatctgtgccctctccacccaccccatcctcattctgcacaggcttcaatctgcgccccacccccaacccccgactccatcctggttggtgcctggaggggctccctgcctcagcctgcctccttcagccggggggatctgagctccacatgttcctgcagggagccctctggaataggactcagccaggaaaagaaatgaggctgacacgggcctcagcatggatgagccttgaggacgtcacgttcagtgagagacgccagacaccaaaggccacacagggaaggtttgaccccatttctatgcaatgtccaggacacgcccatccacagagacaggagggggatgcgtggctgccatgtgctgggaaggagaatgactctgatgggaacagagtttattttcaggggatgaaaatgttctggaagcagaggtctggctgcacacctctgagaaagtactccatgcagctgaattgtgagcttaaaatgctgtgctttatggaattttatctcagtttttaaacattgccaaaaagggtcaggcatggtggcacacgcctgtaatcccagctactcaggaggctgagggaggagaatcgcttgaacccaggaggcggaggctgcagtgagccaagattgctccactgcactacagcccgggcaaaagatggagactccatctcaaaaaaaaaaaaaaaaaaattgccaaaaagccctttggtgagttcgtctcacccttaggggagggtggagccccttggggccttcctgggccctggtccacgctccgcaccctctgagctgcttctccttttcctgggaccttgccccgcacaggctccccccgtctcccccagaccttctcagtctctgcatcagtgcacttccttggggagcactcccaccccagcgaccctgccaccccccacctgcacgtgcatgagtctccctgctggtctgtcttcccctccaggggtgcagccctcgttccctgccttccaaagcagctcctgaggccacagggcaggccaacggcagccggaaatgccatccccaccccgagtctcacctccagatggtgcaggtgaagtgctggtggtcttcgctggtccccagactcatctgccattgctggggagagaagacagcgcgggtcagccccggacacacagctgctctcggagacttctaggtgtgcctctgattctacagtcaggccacctcttctgtacctcccgattcaggggctggccactaaatcccctgccccgccctcctggtggcctggggtttgctgtcatctgtgatcagggagcctgcctgcaccacatccttcccataaaagtggtgcctctaatgagaactaccccaaagtggctcccacggatggggaaataggaacaacgctgtttgtttgtttgtttgtttgtttttgagatggagtctctctctgtggcctgggctggcgtgcagtggcacgatctcgcctcactgcaacctctacctcctgggctcaagcgatcctcccacctcagcctcccaagtagctgggaccacacccagctaatttttgtgttttgtagaatcactgtcttgccatattgcccaggctggtctcaacctcctggcctcaagcaatcctcccaccttggcctcccaaagtgctgagattacagatataagccaccatg[145 bp omitted]aaccccatctctactaaaaatacaaaaaattagccgagcgcagtggtgggcgcctgtagtcccagctactcgggaggc[175 bp omitted]ctatcgtgagatacctttttctcccaggtcagaagggcaaaagccctcctgtctgctaacacaccatatgggtgtgaaaaccaagactattccaggttgtcggtggagctgcaacaggtacaagcaaaatggaaaatgcaggctgggcatggtggctcatgcctgtaatcccagcactttgggaggccaacgtgggatgatcacttgaacccaagagttcgagaccagcctgggcaacatagcgagaccccatctctaaaatgactggcctcttgcacgatgttaccaccggggaacctggttaaacggtacttggatctctctgtaggatttcttacaagtgaatgtaaatctaccatgatctcaaaacatacagttttacttttttttttttttttgagatggagtctcgctctgtcacccaggctggagtgcagtggtgcgatctcagctcactgcaacctctgcctcgtgggttcaagcgattctcctgcctcagcctcctgagtagctgggattacaggcgcgtgccaccacgccctgctaacttttgtattttcagtagagatggggtttcaccatcttagca[133 bp omitted]gggtggttttcccacagatgtaactgcacttgtacaatgaaccctggccaaggttattcacggactgggttggaagtaaccctcaatccattagtacgggattgtcaactccacacgtccatgcaactgaagcgctt[132 bp omitted]gaaacccatctcaaggtgttgaccgggctaggctcttactggtagctcaaggtcctcttccaagctcttgtggttgtggcagatttcagttcctcttggttgcgggactgaagtcttcatttccttgctgccagccagaggctgttctcagctcctagaggccgcgtgtattccctgccctgcag[153 bp omitted]ttcacgccattctcctgcctc[212 bp omitted]gacggggtttcaccatgttggccaggctggtctggagctcctgacttcaggtgattcgccagccttggcctcccaaagtgctgggattataggcatgagccactgtgcctggcccaaatcatctttactggctcttctgccaccagctggagacaacagccagcaaggaaaccgggaccttggtccctgaaccacaagtaactgaattctgccaactaagagcttgaaggagaggattcttctcccagcccagagactttttttttttttgagacagggtcttgctctgttgcccagtagcacaatcacggctcactacagccttgacctcctgggctcaagcgatcctcccacctcagtctcccaagtagctggaaccacaggtgcacgccaccacgctgggctaatttttttattttctgtagagatggggcatgagccaccatgccttgcctgtgatacctttatttatttattatttattttttgagacagagtctcgctctgttgcccaggctggagtgcagtggcacaatcttggctcactgcaacctccgtctcctgggttcaagtgattctcctgcctcagcctcctgagtagctgggactacaggcatgtgccaccatgcccagctaatttttgtatttttagtagagatgaggttttgccatgttggccaggctggtctcgaactttgacctcaggtgatctgcccgcctcagcctcccaaaataccttgagtttggttttatgaagcacacaactgagctgacccagacttctgacctacaaagctatgagataataaatgggtgctgttttaagcccctaagctgtgataacttgttgcactgcacataaaatacaacatcccaacagatgctcatggggatggcagactcccatctcccctccctccttctgtccagacatttgcttgctctgtagaataataacagcagaatctgtcgtcactgtttaatgccaatactctccctttttattggtttaggaagagtcattcaatgagtgtaaggtgatataggtgagacccaaccctgctgtctgctacagaacatctccctacaacaatggatactgtcacagtaagctagagggaattttgaacaactcacctcattggtccctccttgagaggcgtaagtgaacatacacgtatatttgtcctagagaatggaaggaaaaaaaaggtttggtagaaggaaatttttattttgtttaagagacggggtcttgctgtcacccaagctggagtgcaggggcacaatgacagctcactgcagcctcgaactcccaggtttgagtaatcctcttgcctcagcctctcaagtaactgagacaataggtacgcaaccaccacacccgactaatttttttttttttttttgaagcagagtcttgttctgtcgcccaggctgaagtgggatgatctcagctcactgcaacttctgcctcccgggttcaaacgattctcctgcctcagcctcctgagtacttgggattacaggcacctgctaccacacctggctaatttttcgtatttttgtagagatgggttttgccatgggacctggacaagtgaaaacttttctgagcctctagtttctctctgtttctcttttttatgtgaagcattttctcatctgtaacttgggcctaacatataaaggacttggcatcacacctaactataaggaagtagtcaacaaactggcctggcacagtggctcacgcctgtaatcccatcactttgggaggccgaggtgggcgggtcacctgcggtcaggagttcaagaccagcctggctaacatggtgaaatcccatctgtactaaaaatacaaagattagtagtcccagctacttgggaggc[136 bp omitted]acacgtctgtaatcccaggtactggggaggctgaggcagaagaattgcttgaacccagaaggctaaggatgcagtgagccgagatcccgccactgcacgcaagtctaaaaagaaatagtcaaaaaacagtaaagatactgttattacaggcggggaaagggaggctgagaggggaaaggactttgccgacaagctgagtacagggctgagggcccggcctcacaccctcggtgaggggggaccttgtgcaatggaaggaaggagcacttcctccctcttcggagctgcagcgactgatttccttcaggcccaggagggcagatgccctttagcctcctgccgctcccatcactgacccctccccacctctgcgtctggagggcaggggtgcctggacactccaggcaggcgacaggtgacaggtgatcacgccccctcaacgccgccggggcccacaaggccccgctccctatgagttcagtcctgccccagtgatgaccccggcctcacggtcccgcgccccccactcagcctccgaccctaacaatccgcaccccttcttcagtacccacctccgcggtccgcgccccctcctcgggccccgcccccaatgctccgcgccccctccccgggcctgccagcactcaaatatccgggacggcggtggcacgtacccccgggcccacgttatgggagaaggaatgcacgacgccgccgggccgcacgtcaaacgccaccgtcgtgggctcggacaccgcctccgccggcctcagcgccacggcccctaggagcagcgcggcccacaagctcgcgccgacgccgttccaccctccgctgggcgccgccatgttggactagggtcctcagggcaggggcgggtagacggggcgcggcgagggacacgtggagcgtccgccggaggccacgtcggcgtcggctgtccacgtgacccggcacgccccgccctgtccaccgcccggggccaccatcttgggggcgggactttgtcgagggggcgggacttttgccgagggggcggggccgccgagggggcggggccgccgagggggcggcctcgtaccctagggaccctgcgtagcccggcgatccttggagggtccctcaggtggtaatggagttcgttttggggtctcagggtccctcaccagccgtgtgactgactgcagctctttcagttaggagatgtacagggagtgagggaaatcgaaggtcaccattaggcgaacttctcataatcgttgcagccaagatgtgtgtgcatcgatattcaaaattagcagagggaaagtaggatgagaagcaggatgcttgcttttgtttccctcttgttgcccaggctggagggcagtggcgcgatctcggctcactgcactctccgcctcccaggttcaagtgatgcacctgcctcagcctcccgagtagctgggactacaggtgttcaccaccacccctggctaatttttgtatttttagtagagacaggttttcaccatgttggccaggctggtcttgagctcctgaccccaagtgatccgcctgcctcggccttccaaagtgctgggattacaggtgtgagtcatcacgctcgatcagtctgtgtatttgttaataggattatgtgggtgttcacttcctggctttgataacctggcttgtcctaggggttacagacgatgttcacattagggggagttggatgaagcgtattaggaaaccctacagtttctgcagattttctgggaggcaaaaattatttcaaaataaaaagttaaaaagaaaataatccctacctcaaggagttgttgggaggagtaagtgagggaattaagttcccacaccgggacgaatgaactgagaattatatattgtagctattgctatcattagatcccaggttttcaactagagaaggaagtcattctttggttacaaatggcttaacatttcaagaaaacaccagtggccaggcctggggggtcaataattaagctggtgtttctagtccttcccaactggcaaaaaacagaatccagagagaaaacgtcatagatgactcctaagatgggttataattcaccctttgaggaattaaatcactctactccatagctacggagggtggtgagccccagggaggtgagaaggatccccgtggaggctgactcctctgccaatgacagaagtccaagccagttgcctttctgcagtggcagcctgttctaaattgggatacctgcttgcgttaggaaatttattggccgggcgtgatacttcatgcctgtaattccaacccttcgggaggccaaggtgggtggattgcttgacctcaggagttctagaccattctgggcaacatagtgagaccccattcctatatatatattcatatattcacatatgtgaatatatatattcatatattcacatatgtgaatatatatattcatatattcacatatgtgaatatatatattcatatattcacatatgtgaatatatatattcatatattcacatatgtgaatatatattcatatattcacatatgtgaatatatattcatatattcatatatacttatatattcatatattcatatatacttatatattcatatatatgaatatatattcatatattcatatatatgaatatatattcatatattcatatatacttatatatatattcatatattcatatatacttatatatattcatatattcatatatatgaatatatattcatatatatgaatatatatattaatatattcatatatatatacttatattcatatattcatatatatacttatattcatatattcatatatatacttatattcatatattcatatatatacttatatatattcatatattcatatatatacttatatatattcatatattcacatatatacttatatatattcatatattcatatatatacttatatatatatatatttaaagatattttaagattattttttaaagatagccggacatggtggtgggcgcctgtaatcccagctacctgggaggctggggcaggagaatcttttgaacccaggaggcataggttacggtgagctgagatcatgccactgcactccagcctgggtcccagagcaagactccgtcttaataaataaagaaataaacaaacaaatctcttcctccatgcagctgtctgttctggacccatgagacactgtctccataaactggacaagcacagagcagccctgttccttaggtgagtgacacagcacggttccactgatggagtccccattaccttaccacggtgttcaactttcagcctgtcaccatgaaggattcgatgcatggccgagctctgcggctaacaaggaatttcagttgtgagctgttgggagtctgctacggaacccaggcaggttgtgcgtatgcgtgtgcatgcgtgtgtgtgttctttccagaaaggtttcggccccaagtttcacccacccaccacaaatcatcacactaaaaggattaaaagaaaaaacaaggctggccccagtactttgggaggcagatcactttgagctcaggagtttaaaaactgcctgggcaagatggcaagacaccgtccctataaaaaatacaaaaacattagctgggcatgatggcttgtgcctgtagtcccacttacttgggaggctgaggccagaggatgacttgagccatggaagcagaggttgcagtgagctgagattacaccactgcactccagcctgggtgacagagcgaaaccctgtgtccaaaaaaaaaaaaaaaaaaaggaaagaaagaaaaagaaaagaaaacaaggctggacacagtggctcttgtaatctcaacactttgggaggccaaggtgggaggatcacttgagcccaggaggtcgaggttgcagtaagctgtgattataccactgcattcctgcctgggtgacagaggagcaaacaacaaattattccacggatcccactaatcatgatatgaaatctgtcagtcctaaaggacaagattcgatcacacaaatattagattatttatttatttttttttttaaatttgagacaaggtcttgctctgtcgcccaggctgaaatgcagtggtagtttcagctccctacagccttaacctcctgggctcaaatgatcctcccactcagcctcccaagtagctgggattacaaggcatgcaacactcacccagctattattattattatttttttgtagtgatggggtttatgccatgttgctgtggctagtctcaaactcctgtgctcaaatgattcacccaccttggcctcccaaagtgctggcattataggtgtgagccactgtgcctggcctcctttttgtgtgtgtgtgtgtctgtgtgagacagggtctcactctgttgcccaggctggagaaacctcctcagctcactgcaacctcctcctcctccagggctcaagtgatcctcccactgcagcctcctgagtagctgggactacaggcgtgcaccattgcgctgggctaattcttcaatttttagtcgagatggggtttcaccatatcgcccaggctggtctcaaactcctgggttcaagtgatctgctggcctcagcctcccaaagtattgcgattacaggcgtgagccaccacacatggcctttttttttttgaggctgatctcaaatgcctgggctcaagccaacctctcgccttggcctcctgattagctgcgattacaggtggaggccactgtgcctgagtcccctaaatatcattttgtactggaatttttttcttttttatacttcctttttgatgttgttgttgttgttttggagactagggtcttactctgtcacccaggctggagtgcagtggcatgatcacagctcactgcagcctcgacctcccgagactaaagtgatcctccagcctcaacctcctgagtagctgggactgcaggcatgcgccactacacccagctaatttttgtttttgtagagccagggtttcacaccatgttgcccaggctggtctccaactcctggactgatgcaatccacccatcttggcatccaaaagtgctgggattacaggtgtgagccaccacgcccggcctcgtatgtttttttaagcccccccccccctttttttttttttaaaaaaagtggaaatttccaaaggatggagcaagtggataagcagggcagtccatccctgctgttagaaatggagcccacatgccccgcacgttgcaaacagggtctgctgggtgtcttggctgctgggacgatgtgaggagggccttggcctgtcgtggtcctcagggtgcagagtctcaggtagaaaaggaggtgttggctgggggaggatccagcatggaggatgctgtaatttgggttgtgctgaggctctggggagcccggggggccagtccaggccacacacgacagccagagctgagtccctggagaccggtagaccttcctagaccagcgaggacaggactaccctcatcaggtggctggggccatcctctgtgggtcagtctgatcagggcatggtgcccaggcagccccagcaccccaggagtccccacagatggcagtgcccttctgccatgtcttgtctgttgccccccggaagcccctcccactcaggagccccaggacttagaaggaacctcaggcaggtgacatgtttccaactggaatcgtttaatgtgtctacttcttccacgcataattataaaagaataagaatcgacaaaaatattttctttccataatatgtagaggtggtttgtttcttttttttttttttcttttctttttacttttttttttgcccgcccctggcagagctcttggcggggagggaaggggagagggaaatataaccctgaggtggggatggttcagctcccaaccccggaacccctggtgtgtacgggtcaggcagacacatgtggctgggcggctgggctggggaggggacagccgccactgaccagcagagcgtggaagttcggtgcgtttcagtgcctgcctgaaagcttggggacaggagggctgtccacaggtggtgccccccgcgggccctggccgcttctcctgtggggcccgcatgaccctctgctcgggcttgggaagaaatggagcctaccaggtgctgggttgcaaccccgctgcccggtgtggaccccaagtctagatttaggcaccccttgctttctgtcttttattttttatttattttgagacagagtttcgctcttgttgcccaggctggagtgcaatggtgcgatcttggctcaccgcaacctccacctcccgggttcaagcgattctcctgcctc[131 bp omitted]gcctcagcctcccaaagtgctgggattacagacgtgagccaccgcgcccggcctgtcttttaaataattatgaaaaatatccccccaaacaaaacacaaacatcaagttggggaggctggccgggggggacaggcaattgcatgcttgggtgctggggacggtggctggccgggccaggggactgagaggtcacagggagccccaggcggaaggcagcccgctcctctgagtctcttctggcctctccagtgcccatcagcgtgtgacctcctcctcccagaaggcggggagaggaggggctggcccgagaccaccatctctctgtctcggcaaccaagaagcagcggacataaaacccaagagcgtttaaaaaaggataaaaggcgtcggggcggtgaaggcagcggctcctcggggctggccagcgctgggcgggacaaagtgcctcactggggcccgcgggccactcagtccctcccgcctggttccccgcggaggctgcagccacttgtgctgtgatgtggcggctcccggtgggcaggctcagaggtattcctgtagaaagtgcagcaacgtgacttcatagtgctcgcccgactcggggcagcgaatactgtgtctctcgttggggtagatctgcggggagacaggaggcagggctggggggcgtggccggaccacccccgtgtcctaggctcctcccttattctggctcagggcatccgggaaggcgcaggtgctctgaggcccagtgatctgggtttgaatcccacctcggctgttgacttgcagtgtaactctgggcctctctaaaaaatggggtgaatccggacctcacagtctttgggaggatttggtaagacaaagtttacaaaacgccttgcggtgtgcacgcgcttgcacagaggaaagatttaggaagaaaccgtttgcctctttcccccaaaccggctgacgggcgaccaactcatctctgtggaggtggctgaggcttcaagcctcagggacatctggtgccctggtctcgagccatttccactttaccaaaaggcatgtgactagctctgggccttaggacagctgcctgtgaggatttgtgaagcattttctgggtcctcttagcgcccaagggggatcaagccaagaggcaggcagtaacatggaactccccaggctcctgagacctggaccagccaacgccaggcctgggggtggatccacacggggatgcaggtcctgcctctggccacgaaggagggctctcgaggcactgacggacaacccctatagctccccactgccccctaggggttggtaggaccaaggcatgaaaataaccctacgttctccacaaagaaccccggggctggccggcagcaggggcaggtggcccatctacgccacctcctgccagtgagatgggtttctgaatcatcccctcctctccaggctcctggtccccactgttgcccatcaccctgggaatgcaccaagccacccactggtttcccctcctctactcttgccttctttaatccatccctggatgaatcacgagtttgatgacaccgtccccagcctagacctctgcaaggacttgccagtctgacatcaagaccagcttccaggtcctgctgccccaggcacttcaagggcccactccttccccagcccgggcagtggcactccctggggcagactctgctgcccttgacaccagccatatgcacatgttgtgcccatgcctttatgccactctgggtcccagctgcctggttactttttcctcttggctaagagggcagatagagggtctgtctggctccccaatgagcttccagaccaagcccaaggcccggcatgtgacaaatgtgatttgtgtataaagagggcctggggccgccagctgcctggcccagatgttttggggtctttgaaacagaaggagaggtgcactctatctgtcccacacaatgccatgttcccaccccacagcctatctcatctcacgttctacttcctgtggggaggcagtgagacaggaccctgggcccaccctgtgtgctgaatgcttttcttttttctttcttttcttttttttttttcttttgagacggagtctccctctgccgcccaggctggagtgcagtggcacaatctcggttcactggaacctccgcctcccaggttcaagcgattctcctgcctcagcctcccgagtagctgggactacaggcgtgtgccaccacactcggctaatttttgtatttttagtagagacggagctttgccatgttagccaggctggtctcaaactcctggcctcaagtgatccacccgcctcagcctcccaaagtgctggggttacaggcgtgagccaccacgcccggcctgaatgcttttctgaagaccttgtttggccccagcagccttcaaggaggccgagttatcatgaccgtttcaaagacggagaaacgaggtgcaagggtgaatgctgtcccagctacctggcccctgggaaggcagtgggctcgggtctcaggctgggaagagacatctgaagttccattccagccctgcctgatatcactccctgggctgcttgggatgtggggtgtcggtggggggcaccgccaagagatcagctcatcaccgcacaaggtggctctgcctccctcctgctctgcggccccatttccctgctctgttgaaaggcaacaggacgctccccacaggacagagcatgccgaggcgcccaggaagcagaaattgtctgcagtccacaggtaataaaacctggccctcttgcctccaagatacctcctgaatctcccgccggtacaactatggaccacgtcccactgtcccccacaggccatccacaaagcagccagagaaatgtgggtcaaatggcaagccgcccaactctatgctctgctcacaagcccgagtcacctcccaccaccctcagttgaaaatccagccgaagccccgcccccgctgaggccccacccctctatagcagaagctccaccctgcttactgagggccccccctcctctacagcagaagccccaccctcctcaccgctgaggcgctgctcccacaccgagccccaccctctccactaccgaggcccttccccacaccgaggccaaccatttactgcggaagccccacccaccgtaacactgaagccccgtccctctgcagaagtcccaccctcctcgccattgaggccccgcccataaccatgcccaccccttagcgcagaagccccgcccacctagactgagccccacgttgctgccaaggctccacccactcccccactctcctcccgctcggtcccccaagcctggctggctccactcactctagcacccttcactgctgcctcctcagggaatgcttggccccagcgccttaggaaggagcctgctagggccttcagcactcagcggtttcttctacgcaatttctcagtttcaaataaagcccgtctgcggggcaatttcggtaagggttcctccctccattaggcccggagcaggggtgggtgtggcagcccccgatcccgtgcttccagcaccgaaggcaggcggaaccctgagctgtcaagacaggactgatacatcaatggccctgggagctgggagggcggggacacagggctgtggggtggggggctgggagccccagatcccccagggagcccctggtcacagtgggaagccaccccgcctcgtcccaccccccactcccagggatctgtcggctcgcggaggggccgaagcccccaacagccacccacctggagctggtaaggtttccctgctcggatcagttgggagacgaggaagtttgtgtggaaaaagtgcacgttttcgtccaggaagccgtggaggataagcaagcggttgggcctggaaaacagatggggaagggtctgaggccagggattgtccgtggggtaggaggggagcagatcacaaggtcaggagtttgagaccagcctggccaacatggtgaaaccctgtctctactaaaaatatatttaaaaaaaattagccaggcatggtggcaggtgcctgaaatcgcagctacttgggaggctgaggcaggagaactgcttgagcctcagaggcagaggttgcagtgcgctgagatcgcgccactcactccagcctgggcgacagatggagacagcatctcaaaaaaaaaaaaaaaaaaaagatcagctgagtgtagtggtgcgcctgtaagtccagctactgtgcaggctgaggcgggaggatcacttgagcccaggaggtggaggctacagtgagctatgatcataccactgcactccagcctgggtgacagagcaagaccccatctctaaattagaaaaacaaaaacaaaaacccaggccgggtgcagtgcctcatgcctgtaatcccagtactttgggaggccaagctgggtggattgagtccagttgtttgagaccagcctgggcaacatggcaaaacctcatctctacaaaaatatttaaaagttagccaggcgtggtggtgcacacctgtggtcccagctgagcctgaggcaggaggatcacctaaaccctgggagggtgcagtgagctatgattaaaaaaaaaaaaaaaaaatgctgagcatggtggcttacacctgtaatcccagcactttgggaggccaaggcaggtggatcacttgaggccaggagttcaagaccagcctgggcaacatggtgaaaccccatctctattaaagatacaaaaattagctgggtgtggtagtgcatgcctgtaattccagctactgaggaggctgaggcacgagaattgctttaacctgggaggtggaggttgcagtgagctgagattaagccactgcactccagccgggaccacagagtgagactctctcaacaaaacaaaacaaaaacccacctaggtctgctgctgtctgtggtctggagtgtggcatgggctactggtgaggccaacacgcagcctcaccagaatcggctgccctagcccttcctgtccgatacgggagccagtggccacacgtcgccgttgaaattccagtttacattcatccaaattaacggaacttataaacccattgagacagagcacagatcggtggctgccccgggacagggagtgactgctaaggaatgggaacagggtttgacgctggagtgctggaaaggttctggaaccactgcaaatgcaccgagggctgctttaaggtgactgttaggttctgtgaatttcaccacaataaattattattttttgagacagagtctcgctctgttgcccaggctggagtgcagtggtgcgatctcagctcactgcgacctcacccttccaggttcaagcaattctcctgcctcggcctccttgagtagccgggattacaggtgtgtgtcaccacacctggctaatttttatatttttagtagacatggggtttcaccgtgttggctaggctggtcttgaactcctgaagccaccgttcctggcctattattattattattgttttgagacagtttctctctgttgcccaggctagagtgcagtggcacgatgttcgctcactaccaactccacctcctgggttcaagcgattctcctgcctcagccttccaagtagctggcattacaggcatgcaccaccatgcccagcttattttttgtatttttttgtagagacggggtttcaccatgttggccaggctggtctcgaactcctaccttaagcaatcctcctgccttggcctcccaaagtgcccaggcagacttttttttttttttttttttttgaattggagtctggctctgtcgcccagactgtagtgcagtggcgcacgatctcggctcactgcaagctccgcctcccgggttcacgccattctcctgcctc[132 bp omitted]tcagcctcccagagtgctgggattacaggagtgagccaccgcgcccggcccatgcccaggcagatttttaaccccctaggtgactgcatgggattccggggaacattttctggagacgtgccagaaaatgggaacactgttttctctccatcagagaataagacccatgtcaaaagcataaaatgggacatctgagctggtccctggccctgtggacatctatgtcctgaagcacaagacagaggctgtgatggggcctccagcaggatgcaggggagtgggggaggcttgcctgtgaaaagcagtgactcgaattccctcatctttcccagggcagggctgtgagcctccttccccagacaagcatccctgggtgccccttcctgcaaggtgcagtgaggagggagggtgggctggaggggactgtgaggcacatgcaggcagacgccaccacaggagcacagcggggaggctccacatggcctgaggctccctgggcagggccagctggggcaggagggcaccctcatagagacagctggtgccggggtgcaggagaagccccggggaggagcgcagggcagggcagtggccttactcattgggcagcttctccacgtgcagggccacggaacccgcctcatagccgtgctggttgttctcagggacgtccatgtagcgctcagtgtaccctgtgtcgtaggccatccagacggtgaccggggcacccgcgatggccacctgagggacacagcagacagatgggggcagagagagagagagaaacaggcgtcgggtcctacagccagcatcagccgctgtcccggggccgccctggagcccgtgaggagcgctcatgcacatggggccggcaaggaaggggccctcagaccgcgtggcccccgtggacggtgcgtggcatgggggtgggcagggcgccacaggcgggcaggtgcggcccctccccgccgccgcagagggccgggtcccactgcccgtctgcctcctcctcctcctcatcgccgccgccccgcagtgccctgactgccgccggcctggggcccccccgccgctctgcacaccatgccccacctctgcccatccgaggccggggtcccgggctcagcctcccacagagagctgctggcggggttttgtgcagccggatgccatcctgcggtcggcggtggcgggcaatgaggaggggggctcggccccgtggggctgctgcagggagaaacagccacgtggcaaggcccctgccgaggcgcctccccggtaggtgggctccgggtggcgcgggcggtgggcaaacgcggcgtagatggggaagggggcagggaggggcgtggctgaggccggccaggggtgggacccaccttgaacacctggggcttgtggattagccccatgagcgagaggaagcccccgtaggaccagccatggatggcaactcggctcaggtcgatgaagccatacttctcggccacgaactgcaggccctccacctggtcctcgatctccacctggccctgagggatgaagccgggcacctctcagtggcctcctcccggtatgtccctcccctgcagtgacacctctgctcctttcagggcgtctctccctcttggatgaaaagtggctcgctggaagccccctgtccttccaggccctgctaaccctgcctgctatctggggatggctggacagatccagcagccatcttgctctgccacctcccaggtgagtggctctgggagccacgtcccctctgagggcgtcagtttgcccatccctaataaagggacattaacaggaagaggacccattttctagagggcacaaggaagaaaaagacgggtgcccaggcatgtgcaagggcacaaagaatggctggtgccatcgccgttgtcactaccagccacatccccaccaccgccactgccacgatttcaatgctggtgtcccctctgaagtccgtgctgagatcactactgcggccttcaagcgactgatccatggggcccactcatgtgaatgggatgaggggcccttataaaagggcctgatggagggaggccacggcttttccgctccttgcaacccctctgccgtgtaggaagcagcacagggcctctctggagggttgctgaccaggcaacctcgtgggaacagagagcagccctccccgacacagccctgccttggccttggacctcccagcctccagaactgtgagagattttcgttctttataaatccccaggctgtggggttttgttccagcagtgcaaaggggccgagatgatcgccatcaccaccgtcgtcatcaccagtgtcagcacaacttgtctctgtccctgcagggcgcagcccagagctgagcagcaaagcatacatccccttttgttctaaaagggcgcctcattgagcctgcgtcaccccagccagaagtgcccttctgcgggtggtattccagagccgctcccatgccctgcacccacacggcccagggctcccttcccgagacccaaaggacccagagcaacagggaggagttgttaccatttggtttttcagggccccttcgaaccgaagccctcgctgacaggagcccctgccgtcaatcacaaccacggcgtagcccagggaggccagtgtgttgagccgcaagtacttgatgcctttgaaggagttattcaccagctgcacctgtggggaggtgagggccagcagtccagcacgagatgccgggcaggacgggcctggcaggggagatgccggtgggctggggaccgggccgggctggggcctcagagcctaatgaaagcacctgtgccccggaggctctggatggacacctgggagtggcaaggcgggaggggcccatactcgggaccctgctagggagggggaagggccactgtcaggctctttctcagctgggccactgccccagtcctgcctggaacaactactctggcatgatggacattggggtggctccttctcgggtggggccatctgggcactgcggggtgctgagaagccactccaggccaggagaactcgcagtggtgatgaaccacaaagtacccagacatcgccccgtatcctctgtggggacagagctgctctgggtaagatgtgcgcctaagatggtccaactgccaatctgctgcctgcttttgacccctgctccaggaattgggcccagggcccatggccacctccataccaacctggagactaggggacttcctagaggaacaagggagagtcagcaggcggagggggaaggggaggccatccaggaagggcggggagcgtgcaaacgggcacagagaaaggagggtgaggggccccgaggaccctgtgtagtcagggcaggcggggtgggctggggcaccaggcaggtagccggggagcctcctctggttgactgttctacagctggcacttgagtggggatggggagtcctcgggtggatggtggggtgggggcctggggagcaggtgtgcactcacctgggggcctccatatacaaagaggacggtggggtgcttcttccctggctgcaaggcgtggggcttgtagatcatgccgtagagccgcacatccgagcgcgtgtggaaatggaagatctctggaggaacataatccggggggcagcctgcgggagacagggcggctatctggctgcccggggaagccacatccagctgacacccttgttctcctgcccaccccaagccttggagggtggaccaaagcaccccctcttttcctgggcttcccgagagttgataattgaaaaaaacgtttttttttcattaaataagatttgtacagtttttgtagagatggggtcttgtctccctgttgcccaggctggtctcgacttcctggcctcaagcgatcctcccacctcggcctcctgtgtagggtcactgctatttttgcaaagcaacagttgttgtccaattaggatggtgggggtttttctgttttttttctttttcttctttttttttttcaagacaaagtcttgtgatcttggctcactgcaacctccgccttcctgggttcaagcgattatcctgcctcag[134 bp omitted]cggagtctcactctgtcacccaggctgcaatgcagtggcacgatcttggttcacggcaacttgcacctcctgggtttgagcaattctcctgcctcatcttcccaagtagctgggattacaggtgcgcgccaccacatttggctaatttttgtacttttagtagagatggggtttcaccatattggccaggctggtctcgaactcctgtccttaggtgatccacccacctatgtctcccaaagtgctgggattacagacgtgagccaccacacccagccatcgaactcctgaccttgggtgacccgcacaccttggcctcccaatgtgctgggattacaggcgtgaggcactgcacctggcccaaagttttttctttaaataaatgtatgtaggtaaattttggtggggcaatttataggaaggtgagtaaagggtactacaggtctaggggtagcagaagtttactgtggagggccagatagcaaatatattgggctctgggaattgggcgtggcgggacacgctccgtgctgtgtctctgtgtcatctgctgcggtagcgctaatgtggccacagaccacagagggactgcacgtggctggatttggcagcagttggcctgctcctaatgcaggcagtcttcaaacgtggcacagattgggagtttcgggaaacagtgcctcgttccccagggcactgaggttctggtctctgcccccactgctaggctgggtgccctgctgagccccttcccctccctgacccatctcctcatctgaagccagggctccagctcctggcggtgtcggtgcggacaggagagtgaggactgggctctagagggaggcctgggatctgtttctgctcaggggtgagggcatcacaaaatgctttccagcccacggaataccccgcatatgctggaaattcgttgtgtttagaatgttctggaaacccaccaacatggcagagacagggccagggtgggttgtccttgtactgagtgatgcctgggagcccagcagtgtgctgacccgctggttttcatcccacactctgtatatacagtttcgttgataaagaaacacttcatggtgatacgctgatgtgtgtgacggagccagcactggaacccggagtcaccaatgcagggtcctggccaacttccaggttctgggcaaggtgtcaggttgcctcatttcctgaggcccccctgtgactgaccctttgctccttttcctgataaaggcctcggagtgtcggctctgagcaggtgctgctgtgggcggcagcctctgggcacaggacaccataaagggccctctgcatgccgctgtggccaggactgcagggtcctggagaaggtgagtggaaagcctgataaccacggcgggtttcaaaccagtgtgggtggactctgacatcccggccacccctgcatggaccaccactgttcaaaaggttttttttttttgagacggagtctcgctctgtcgcccaggctaaagtacagtggtgcgatctcagctcactgcaacctctgtgtcctgggctcaggccattctcttgcctcagcctcccgagtagtgggactacaggcgcccgccaccatgctcggctaattttttgtatttttagtagagatggtgtttcaccgtgttagccaggatggtctcgatctcctgaccttgtgatccacccgcctcagcctcccaaagtgctgggattacaggcatgagccaccgcgcctggcccaaaatgtttttaatttttaatttttttttagagtcagggtcttgctctgttgcccaggctgaagtgcagtggtacaatcacacttcactgcagcctccgacttctgggcacaaatgatcccccccatctcagtctctggagtagctaggactacatgtgcacactactacacccggctaatttttaacatttttgtagagggagttcttactatgttgctcaggctggtctcaaactcctacgtgcaagcaatcctcctgccttggcctcccaaagcattgggattacaggcagaagccactgtgcccgctgatgaaaatgtttacttgtcacctgcccactaccctgggagctcccagtgacagggtctgtgtctcactggttaccattttggcagggggttggcacggagctgcatccctgccgggttctgtgcagtccggccctttactgcagctcgaacccaggaccgtctcggacggcaggggctgtggcttatgtcctatgacgagttcccagatgcttggaggggcctgggtgctgtgggaggccaggcaggccagctccaggcctctgcctctttccccagcatggggccctcgtcccgttttacagccgggcgggcggaggcctccgtggggcggggcaggggctactcactggctgcctccatcatgctagcccagaagcggggctgcttgtgcagggggtcgtcgtcggggccgctcagcttgtagacgtgcacgcagggcggcgtgctcacgctgctgtagtggctgacgaacatgtcgaagttctgggggtggaatggggtgatgagctccacgggatgccgctgcgccctttccactgggtgccgaccgcagatccagggtagcttccctcccgcccgcccccatccctctgcccctgcctgtcatgaaacctcaaagctccacccgctgctgcaaggggggcaccactgccatcgccccattctgcagagcaggaaactgaggccaggacgagtctgtcccccagccaggggcctatggacagtcaccgaccgctggatctgccgagggctctgccactgcacaggcctgcaagcttgctggctccacagctggcaaactgcagctgactcgtgccctggactaggggtggccctctgcatggccaccgcctgacattctagaatgttctgagaggctaagggccacatcccaccgcacacagagcggcggagccccagctcagcggacgggcactggggggctccaccacttactaccctgggattggtggtgggcaattcactcccttccctgccctacccaggaggcaggggtgggcactgcctgccccaaggcagctatgagaatgcgagaccatgagaatgaccctgagtgctgtgccgggccatgagggactgctctggctgggagctgttggacgggcacagggcggtgccgtgaggctgggcggtcccacctggctcatggagcagctatgggagaagccgggcgtggtgaggcgtacgatctcgccggccgcctcatagctgaccacgtagaggtggtgctccagcggcgtgtccttggtgccctggaagtacaccagcttggtctcctcattgacccagatctgcagggggacaggggatcctcgtgatgcgtcccagatgcccctgggcccacacccctctccacgccccacaggagtgggccccatgttcctcggactggggacgcatgctgtcctcgcccaagtctggctttagggctggagatgaaccatccctgagagatgcgcttatctggccccgtgggctgggagcagcccctggtcgagctgggaactgcgtgtcctcaggcgggacctggggcctgcattccacccccagacagctctttcctagcttgaattgggagggcccaccagagccaggtgggaaggccagggagggcaccgtgcccgaaacagaggctcagggaaacccggcagtccccagcctggtcagccgttcctccgacccaggtgcttgggttcagaagtggcagggccctaccttcctgtgggaagccccagtaggccccgaagtggtgtctcctggaggagtgggagggcagcctgcactgcgtggagcagcggggcccctccttcacctgtgctgggatgctaatggtctcgaaacaactgctgctgcccaggagcgagcaggctttggctgatgcctggaaaggagccgggaggcctcagagccccgagggaggagagggcattgcccctgtgcccagggcctgagaggccggtggaggcagctggagcgtggggtgaccagggaccctaagacgtgaagaaactgaggataagtggtctcctgggacagcggggcacaagcttccagtcgggggagcatcatgccccacaacaaggcagctggacgcatggccccagacggcctgcagaggacacacttcctctttcatgatttctaaaaggcttccaatgttttccttaatttcagggtgaaaggataaagcacgtgaatggcacaacgttcaagatgagacggggaggtgatgaaatgattggcttgtgtgtatggtagacaccgtgctgaggcctgcgaactgctgtaaagcagggtcctcacaggtgtgtgtgcgtgtgtgtatgtgtgagaatgagtatgtgtgtgagtgtatgtgtgtgtatgcgcgtgcgtgtgtgtgtgagtgtatgtgtgtaaaacacacatgcatggagcaggggaaggctgcaaggagaccctggtaccttggagccgtgcctcgccaaaacctcccattcaccgctggtcagagcaatctcttccttaatggggcacttaaattcatctggaaagaaagaaagaagggaggtgaaggggcctgggaggtgatgcaggcgcccaaaggcacccaggccaaattccacccgagcagactcaccatggagccactgaaaccccggcttgctgtgaactcagacgccagcacaggccactgcgtcagacctgccacatgggcaaggaagcctgcggggcctgttcctgccatgtggatggcaggcccagtgtttcccacgataaaccaggagacccgtggctcactcctgaaatcccagcactttgggaggccgaggcaggaggattgcttgaggccaggagtttgagaccagcccgggcaacatagggagaccctgtctctccaaaaaaaaaagaaaaattagccaggcgtggtggcgtgtgcctgtggtccaagctacttgggagattgagctgggaggactgcttgagccaggaggttgaggctgcggtgagctatggttacaccactgccactccagcctgggcgacaacaagaacccgtctcaaaaaaaaaaaacaaaaaacaaaaaacaggaagagaaaccaggaatctggattttcattggaatttcccaattttagaaccctccaaaggccacatgacatctgtgtgtggcacgggaaggggggcggggagtgtgggggaggagccaactgggcccatgacctcttaggacacattaggactttgtaaaaccagactttttttttttttttttttttttgaagacggagtcttgctcttgtcgcccaggctggagtgcaatggcgtgattttggctcactgcaacctccgtctcctgggttcaagtgattctcctgcctca[133 bp omitted]cagcctcccaaattgctgggattacaggcacgagccactgcgcctggccgactttttttgtgggggcgagggggtagagacagggtcttactatgttgcccaggctggtcttaaactcctgggctcaagtgatcctcccacctcggcctcccaaagtgctgggattccaggtgtgagccacatccccggctggaacaagatgctggtgaaagcgctagggctagagaccaaggctctgctggttttatgattgtttttttggggggtaggagggttgacttcatgtttgaattttcaccaggtaaagaatgacagtgcggggtgcatcatggcacacagcagaaacacactgagatggtttgtaactgagggctcactgtcctttcctaaccttttaggtctaaacaagctacggcaaacgtgtctgtcaggagcacgggagggcagatgtggtttccctggcgtagaggtctgggtgtggttacttgtggcatcggggcctggggaggagagcggttcccacccagccccaagacccaggctcctgcccgcgtcccgacgtgttccttctgatgcaatgtcacttggggtcacctcctcgccatgcagctgctgtctaggagatgcatggtgtgtgctgggggctgagcagggtgctgggaaatctggtgtgcccacctcacaggccgggggtccctgggggcactgcagcagcctggagggtctgtgcccctggagagtggcagctgcagctggctccacttgagaccacatttgaaacgtgagcactcgggctggcccattttcccacagggggcaaaatgagcatttacatgaaatcccaatgccagatggcggtggctgagccagccagacagaaagtgaaacaccaatgagccgaagacagctcccctttgagacgcttagccagtaagtctgcactggccgcatcccacccaggaggaccccgatgctggcctgaggcagctgtcaccccgccggtccgcatcatactcagctccgtggcagcctacagcatcacctgtccctggctcattcgcccttcagctcctgcagtcccggatgcctcgctccctggggtctctgtcccctgtgttgggggacgccttggctgctgtgtgggctctgcccccagagggcaccggaccacatctagggacatctgtggttgtcacaactggaggtgctcctggcatggagtgggtggaggccagggatgccacttggtgcacaggatggccccgccccagagaaccacccggccctggcgtccatggtgtccctgctctaactttgaagagcctgggccgggctcccggaccaccccacctctctatccagaagtgacccttgggagctctgtcccatcccgaggctgacactgtcagtgtgcaaggacacctgcaatcccaccaggagtctcggttccctgagctccaggcacgggaactggcccatacagcatctccactaccgggcacctcaacttgaacacatccaaacccgactctggattttttctctcctagaacagtccctctctgagtctgtcttagactggacctgcggagccctccgggcatccatgccgcctccctcctctctgatcccccaccctttccactgcaaacggtgtgggctcagctgtccaagcacatccagaatcagacccaccaggacagctcagccactgccatgacagcaagcctgtcgcctctcccggcccctgggcctgtgtgcaagctgcaaccagaggagtcatctgaaactgaggtgagggtgacgacttcctatttctctcggggtcaaagcccaagtcctcctggagccccagcaggccctgcaccatctgctttttctctccccaccctctcctccctctctccccctcctccctgtgctccagccacaggggcctcctccctattcctccaacatgccaggaacagtcctgcctgccccagggcctttgtacgggctgtggctctgcccagagccgtggtgtggacccctcacctccacagcatgctctccagagacgtcctcatgccctcccgttgtagaaagaaggcccctcaccctcaagcctctcgcccgactgcatttccttccaccacgcacatcacaccagaggcagcacctctaactgtttctggaatactgcctcctccactagaaggtcccaagagcagggattttcctttttctttatttacagtgaacaattccatcacagctacctacagcaggagctggcaaatgtttctacaaagggctagacagtaaatcttggccttgcacaacagtttctgctgggactacccagttctgctgctgcagcacaaaagcgaccacagacagtctctgtaaacaagtggctgtggctcagtgccaataaaactttatttatgaacacaggtggtgggccggatttgacctgtgggccgtaggtggccaacccctggttgtgctaagggcctggcacaggggaggtgctcagtaaatctgctgcctgaataagccaacagttgggtgctctaagccctgccagatcatgcagtcactggggaaggctggcttcctgccgatccctgttccttctcccgcagggtgtgctggctgagtgggggggccgaccaatgaacaaacagcatattgaaccacacgtgactaacgcgatgagtcgacagcattcgtcaggctctgctcaccttccccggggctgaagggctcactccaatcgtagccctgggattttaaaacggcggtgactttgtacaaatggcagaagccggtcttgcattcattggcgcggagaaagcagagctcgtcctctccctctgattgggggaagggatagaagatgtcatgaacctgtccggaaagcagatagaagatgcgtcagaaggtgtgggtggccgggcatggtggctcacaccagtaatcccagtagtttgggaggctggggcaggagacttgcttgagcccaggaatttcagagaccagcctggacaacatagtaagaccccacctctaaaaataaataaataaattagccaggcatggtggtgcaggcttgtggtcctagctactctggaggctgaggtgggaggatcacttaggcccaggaggtcaaggctgcagtgagctatgaccacaccactgcactctagtctgggcaacagagcaaccctgtctctaattaaagaaaaaaatagatgaggggagaggctccaatggctgccagactcaccaacccccctagaccctcttccctgccagccagggatggccaaggcctgagctcacttctccacacaagggcaaacaccacctgccattggcgctcagccttctaggacgtgggggtggggacagtgtgactccagggcccaggcgggcatacagccagcgcttgccccgcttacattgatccagacgttggtgacctcctcgtacaccacatacggctggacattcctggggacagctctggcagaggctagccgctgctcctcattctctgtgctcgggatgaacagggccggggggaggaggacgagctggagccactgctggggccggtccaggaacatggcccaggcgctaagggggaagatgcgggggaagatgagagggaagctgggagcctcagtggcctgcacagagaagctggggacgcagcgtccaaacccgtgtggaatcagggctgggcttcctgcgctggcttcacctgcacttggccaagtaaccctgcagcacccacaggcttccttcctggcacatgcttaggggaggacaggatgggtgacaagatttcatgatccaagtgttccggaaacaatggcctaagtctcacagcggcaagctctaatagtttctcctcttcactgactcttcggcccacagtcgctatcctttatttcgtagtttgctttattttatttatttatttctttatttaattttttgagacagagtttcactcttgtccaggctgaagtatagtggcacaatctcagctcactgcaacctccacatcccaggttcaagcgattctcctgcctcagcctcctgagtagctgggattataggtgcctgccaccatgcccggctaatttttgtatttttagtagagacaaggtttcatcatgttggccaggctagtctcgaactcctgacctcagatgatccgccagccccagcctcccaaagtgctgggtttacagacgtgagccaccgcacctggcctaaatgaacaatttttaaacttgaatttattttaagaggagatgttagtattctacgtggaaaagcagcacctccacacacagaacaacgaaaaccaaaccaaagggaagcatcacagggacataaaatactaactagagtgggtgcctgggctcaggcctgcaatcccagcactttaagaggctgaggtgggcgggtcgcttgagcccagaagttcaagacctgcctgggcctgggcaacatggcaagaccttgtctctacaaaaaaaaaaaaaaaagtccaggcacagtggctcacgcttgtaatcccagcactttgggaagccgaggggggcggatcacaaggtcacgagtttgagactgtcctggccaacatggtgaaaccccatctctactaaaaatacaaaaattggctgggcatggtggcacgtgcctgtactcgggaggctgaggcaggagaattgcttgaacctgggagtcagaggttgcagtgagccaagatcataccactgcactccagcctggtgacagggcaagactccgtctcaaaaaaaaaaattaaaatattagctgggagtggtgactcacacccacagtcctagcaaatgtacatatggcagcagcacataatagaattcattgttaacattccattggaggcattaaccaatgcaattagaaaagtgaacaggctaagaggcataggaatgcaaaagcaagaccctcatatctataaaaaatacaaaacattggccaggcatagtggcgagtacctatagtcccctctactcaggaggctgaggtgggaggattgcttgagcctgggaattcggggctgcagtgagttatgatcgcaccactgcactccagcttgggcgacagagcgagactccatctcaaaaaaaaaaaacaggcagaggctgaatttgcccactggggtttggggcccccgtttagggaggtggtagagttctctcctcgacatgggtgggaggctggggagtgagtacaggggagcacctctactttgtgactcagtttttctgagcctgaggtctggggacacctgaaatcccctctgtaggtctcctccacactctgggtaactggatcagcatgtcctagtggcactaacactgggactcataagtccagtgtttcatcctcagactggctgaggtcaggagggccctttggacactggtctgaggcctgtcctggcggttgcactgcgggaagacgtgagcagatggaaggaatggcacggaaggccaggaggcagcttcggtggctgcccagggcccagggccctgcaggtgaattccttgggttccagccagagacactcactatttgccatcccgggtccacccggccctggcgatgtactccaccttcgggaacagcgagctgaagggctgcaccagctccttctcctgggtcgagacgatctgaagggaaacaaacaggtgtgggtcatgccctggcctgcccggcgctgctcggaggagaaggccactgcgctgggtcccatcatgtcccccccaaattcatatgctggagtctcagcccccagaaccccagaacgcaaccttctttggaaatggggccactggagatgtactgagttaagacaaggttgtgtggatgagggtgggccctgatccagcatgactgctgtccttacagggggacacatagacatagacacatagagggaagccgtcttgagaagagatacaggaagcaacggccaccaagaagccatggagaaggagccacctgctagcagcttggtgttggacattatcaatttcggccgtgtaagcctcccagtctgtggtcctttgtcatggcccaaacaaatgactacacccaacaggggcaggtgggctgggcaagccaacggcggcaccccagcaggtgcctggacccaaaggctctggtctgggctgtcccttagagccaggtggctctgggcaagcacagtccccggacccagggcttccccatgcttaaacagggctggcacggcgtttccagggtattgagagataggggacctgagccttcctcgtgtctaaatggggctggcacagcatctctggaggatcaaagggagaaacggcagcagggcctccagctctaccacttgagtgggtcaccagccccacatccccaagccgacttgtttgattggcatcaccccagcccacctaaggactctgcacgtctgagagtgcaaggagccactaaaacagcctggcggggccaggtgcggtggctcacacctgtaatcccagcaccttgagaggctgaggcaggtggatcacttgaggtcaggagttcgagaccagcctggggaacatggcaagaccccatctctacaaaacccacaattagttaggtgtggtggtgcatgcctgtagtcccagctactcaagaggctgaggcaagaggattgccttgagcctgggaagttgaggctgcagtgggtcatgattgcaccagtgtactccagcctagacgacagtgagaccctgtctcaaaaaacaagaacaaacaagcaaagcaaaaccccagcctggaaggaggtttcacgtgcatcactggcaaagccactcagactgatcacctaaaatctgccagaatgctactgtcaagaatgcaaaagaaggccgggtgtggtggctcacacctgtaatcccaacactttgggaggccgaggcgggcggatcacgaggtcaggagattgagaccgtcctggctaacacggtgaaaccccgtctctaataaaaaatacaaaaaattagccgggcatggtggtgggtgcctgtagtcccagctactcgggaggctgaggc[138 bp omitted]agaggtcctaatcacattatgtcatttttgcaagagcacacaagggcctccttggtttgtcccagcccttccatcctctggtgcaggggaagggagggtttctctggacgcctggtgtccccatcatcatctgctctcctctgccccagcctctttggcccagggctctgtctgcgagttctccaacatgatgttacttaacttcctgacacccttctgggtcttatgggatttgcaacttccgagagaactgatcaatgtggggctattgggggtcccctgggagggcagggatgtgagagaagggagggatatgctgggctgcagggggtggctacggaggagggggccgagggagatgcggtcacaggtgtggtctgctggtgaccgccttgctgcggggtgatgatgccttttgctgcctgatggcgcctccaggctgtggggtcctttgagatgacccccaggtgatgaggaccctgtgtactagatctgaggaggtcggggggatggggatccagaacactctcctccccacagtagctgacgggtccggtgaacggacctgaggatctgcctgaaacgctggaggaaacagcccgtccgaagttggggtcccccagccatctgccccacggagttctctgttctggaaacttggagagagggcagctctggatccacacgtcacccactcccgaggtggcctgggagcacctgccgcgcctgtcctcgcagggcccctgcccggtgcttgttccttaccgcggcgtggcctccagtctcaggacccactctgtgaggcagggaggccagctcgccacgccgcattctaggcacaggtccagagacacacagggaaggcctgtggctaggcggaccgggcggcagggctggggcctggggagtgcccccgagagggaggtgagtgacctgcccatccacccagctgcctacccggcccttccccgcatcatctagtagattatctggtatgcagcaggcccccttaccttgccctggctgtcagtctggaactcagccagtttcaaggcaatcttgggattcttgctgcctgcaaaaaccgaagtgaggtgaacaccaggcaggcatcacccgtgtgtgccgagagccggcacggggggcctgggctgtggggtgacgtccacagagaggtgtacaattggagtgggggaggcaggagaagccaggtgtcccacggtctgtctgtaggcacatcgtcctgctggaacaggcatgacaccctcaggtggggaccttctgactttgggcctggatcgcattcccaacagtgatgtggcatctggctttctcatttaaaaacacgggccacaccctgtgctgagagctggggcttgtaggggccgcagataccaggaagatgccatccctgccttgggagagctccagagcagacggtgaagcccgaggcatcacagtaaaactgacaacgtgacaagtggggtgtgtcccatgcaaaaccagggagcccgtgtgacagccagacctgcgccctccggaggccaatggcgacagaataagggacccaagaggcttctgaagagtgggacttagttcaggctccgaaagagggcgcgggccacagcagagcggagaatgcttatttttttggctagacctacgagaaactcaactccagccctcgtggctctggcctccagggcaggtgacatctctgagcctgttttctcatctgtcatacgagggggaaaagactgacttagctcatttgcagtgggagttggaaagaccgtacaggaagcttccatctagcacggcacagagcaggcactcgcggagtatgggcaataacgatgctcttatatggtcccatgggggttgcaaacccaaggcctgaacgcggaatctgggctgcacgtgtgttctgtttggctccagagatatttttaaataattggaaagatgtttaagaattgggagtggccgggcgtgtggctcacgtctgtaatctcagcattttgggaggccgaggcgagaggaccacttgaggccaggagttcgaaaccagcctgggcaacaaagcaagactccatctctacagaaaatttaaatattagctgggcatggtggcacacacctgtagtcccagctacctgggaggcagaggtgggaggatcacttgagcctaggagttggaggctgcagtgagctgtgattgcaccactgtactcctgcctgagccacaaggtgaaaccttgtctcaaaaacaaacaaacaaacaaacaaacaccactgtagtgtgagggccaaatccagcctgccttctgtttttgtatggctgaaaatccttctttcgttctgagacggttaagaaaacaaacaaacaaaacaagagtgacattttcgctaatatgaaaatcatatgtatctcaaggtgaattatttgtaatccaaacttcagtcaagtttccttggcacatggctacgcccattcctgcacgtgccacttctgtgctccagcagcagggtggggcagttgcaagagagcctgccttcgtctggccctggaagcctgagatacctgtgccctcatcccttccagagacagcttgctcacttctgagcaatatgatccggtggccatggtaagccaggagaaaggggcggcccctgcagggcagaagccttccttctacacccccatagatgcccagagcacacacatgcagctcagagggcctgggggacagtgcacctcaccagccatgccccaggggcctcagatccccggcccagcccctcacatgtaccgggcactcacctgtcctggggtaccgatacgagtccgtcttcctttcttctagcgcaggagaggggacgtgaatgacctccacctcggactcatcgacttcctcatacaggattcgcagcgtcttgaggccctctgaaccttgggtggggtggtggaaaaactgctgagggtgccagaggcagagtccctgccatcagcaccccccgccccctgcagcaccggggcctgaagatgggcaccgagggctctgaaaccagaaccccggctctgccattcgctagaccttatgccagtcccaactctctgggcttcagtttcctcccctgtgcagtgggaagcagagcagggctactcccagcatgaactggcatgggaagtggccacgtggggtgtaacgggctgaactgtgtcccctcttagggcaacagcgatgtctacagtcgttaaggaactctctaggtgttggtattgacagactgtggaggtggtttgaggtgaaaggagtaaggcgcaggaaggacacagcctgtgattccaggaggaaaagcacgcccgggagcatgttgaaaaatggaagggacctaccttcccaggaggctgtggggcaccaccagtacccagtgaagcggtcgaactcttcctgtatgacgaaggtggccacacccgcagacttggggtcatccaggacattggataaacctagggggagggacggagagcatcaacaaggggtgagcagcctgctaacactggggacagccaggggctcaaggagagcatgagagagagggagagagaaggagggaaggaaagggaaggagagggggagggagagggagggagagggagggagagctcggagccgactgctttcaagcagggttgctccaccccacactgtggacactggggccctcttggtctctggggtggggccgtccagggcacagcagggtgctgagcagtgtccctggcctccactcaccccatggcaagccaggagcacccccgcccaagtgtgccgtctaaaaacgtctctggacatcgccgagtggccaggtttggaaagtggggcccgggcttatgggacggagaggcagcgatcagtgacttgaaaccaagacaaggaaggatggggtcacttctgatgagcaagggagtggagagaacacgcaggaagcaggtgagatgtggccttgacttgatggggctggacaggcagagtggaggggaaggtgtgcaggggcagaaatgcccaggggcacctggaagagggtccagagcaccgtggctgggctgacgcctgcagcagaaaaccacagagcggcagggtgcggtagctcatgcctgtaatctcaggaccttgggaggccgaggcaggtagatcatttgaggtcaggagctcaagagcagcctggccaacatggggaaacctcgtcacaactaaaaatacaaaaaaaaaaaaaaaattagccaggcgtggtggcgggcacctgtaatcccagctactcgggaggctgaggcaggagaatcacttgaacccaagaggcggaagttgcagtgagccgagatcataccactgcagtccacctgggcactcccgcctgcgctcccgcctgggcaactgcactcccacatgggtgagactctctcaaaaaaaaaaaaaagaaagaaagaaagaaagaaaactacagagcggcagggacgccaggacctcccgggagacatggtaggctacagaaggtatgcacgggagggtggcttgtgaggggtgtgtgcaggaagaccctggctgtgggggcaatggggcctttctggaagctggccaggtggctatggtggccgtgcacaggaggggctggccccaccttggtggcagaaggtcagccgccgctcctcgcctgtctcgatgttggccacccacaggtcgctgttattgatgaaggagaagaaggcagggtcggcagggcagattttggggtccatccggggccctgagcactgggtcttgatttccagcggtttcataggggacacctgaggacagagacgcccagctcagggggaggggccctccacgccacccccgcacacagccagggccagggctcaccatgaagccgttcttgccgccgtcgcggcagtggaagaggctgttgctggcctggaagaggaagaggccactctcgctgtggaagtcgtaggaggtgatgccgaagacccccaggcgtttccgctccctcagcagctcctcctcccgagagtagaccccatggtggggcgtggcctggaaacatacaggggacagggggcagcgtcagtgggcaaagaggatctcccgctggccagggcagagatcctcgggctggggcattcccagggaatctgacttcgggcctcgccagagagaacttcctgtactgggcagaattggctgccggagcccttgacacagtgggtggccaaagattgccagcgaacctggccctgcaggactggctgagtgtcctaggaggtggcaggggagactctggggccagaagcctcctcacttcctgagttccctccccacagaccctctccatagcagatgggggcccctgggaggggctgtccctgccccacaccaccggagtactctctccgggtccctagtgccattcttacagactccccaccctcctaccctattcacaatcccttcccatcaagagctttcaatttcgtaatcccagcactttgggaggc[134 bp omitted]gaggcagaagaatcacttgaaccgggaggcagaggttgcagtgagccgagattgcgccactgcactatagcctgagtgacagagtgagactttgtctcaaaaaaaaaagcagaatcaaaagcaaaattacccctacactctgtggaaagcagtgtaaacacaaggacactggcttggggactcagagacaggccaaagtgagggccagtgaaccagtggtggagaaagtgggagtgtcacgatctcagccactgttagatatcattattgttacattgttatgtttatgttgttactatgttataatgttatgttatttttattgctatattgttactattttagagactgggattcgctgtctcccaggctggagtgcaatggtgagatcacggctcactgtagccttgccctcctgggttcaagagatcctcccatctcagcctaccaattagctggaactacaaggcgagtgccaccaggcctggctaattttattttttgtagagacaggctcttgctgtgttccccagtctggtctcaaattcttgggctcaagcaatcctcttgcctcggcctcccaatcatcaaacacaaaaacacgccaatcaatgcaaaaggcatttttcctccctcaactatccccagagagccaacactggatgagattgatgattaaccagtctctctaaaagggcctcaagccaagttaattcccaatctttggtgatgccgttaaaaggaagagatgcttttggtaagagtttctctgtcgcttgagtacaggtggtcagggggaggagggaaggctcacccgccagagtccacaggacggagggtttgtgggaactcacagccggtggggcagagaggtgaccgaaggcatgtatggcctgtggggctggcctttgccacctcctcgcccacggtagggcccacgcctaatagcacagcttacctggaaatgatccagcatctgcttccaggacaggagcagcagagcctctttccggaccttcttgggaatctcagagtagaggagggagttctctcggctgccatatggcattcctaaagggagaaaggaaacacccagaacgggtaccctggctcaggatggggagacgccctcagcctgcagctgggcccagctggttccctctgcttctagaacattctgccaggccgccggcgggacagccctccccggaaagctatggatcctgggtttgcttaagtaggcagtagggccttccacctgagatatttctgctgaatctcacggcct[131 bp omitted]aggccccgtctcaaaaaaaaaaaaaagaataaaataaaagaaaaaagaaagaaaaataaatcgcacacaagagaacaagaagggcagtcagaaacaaacatccaactctcaacaggttgggttcggctctccaaggccctttatcaaggcttttgcagacgacaagaatttaatataggattagagggagggcaaaaccatcaaaaaggaatgagggccaggcgacatggctcacgcctgtcatcccagcactttgggaggccgaggcaagcagatgacttgaggtcaggagttcgagaccagactggacaacatggtgaaaccccatctctactaaaaacacaaaaattagccgggcgtggtggcacgcgcctgtaatcccagctactcgtcaggctgaggcaggagaatcacttgaacctgggaggcagaggttgcagtgagccgagattgcgccactgtagtccagcctgggtaacagagcaagattttgtctcaaaaaagggaatggggaagcgtgcacctggtccagtatttcccaacctcgcccctaattacattcgggcctggaccatcctccggggtggggctgtcctgaccactgcgaggcgctgagcagcatccctgtcctccgcccactccatgccaggggcaccccacagtcgtgacaaccacacatatccccaggcatctcccagtgtcccctgcaggggcagaatcaccccgacctcaaaccactgatttaatcgaagcttctgtagaaaatgacggtagtgagagctgccaagcgagggttttgggtggattacatgaggtaagaaacgtaaagctctcggcacaatgtgtgtgaccctctgtgaaatcagcgtatttcatcagtaagccgcggctttccacctacgcatgtctctgggcttgggatgggtcttactgcggaaggcgcaatcaggtccttagtggcaaataaaataactgtgtattttccaaatggtcatgtcttagatctgctggatgacagtacaattgtcattagaaaagggaatggcagaagcaggatggtaacccctgggaagcctcggtttcccctctccatgcgacaccactgaaaaaccgggacagggctcctccaagcataaagctgtccagtagcccacaaacgtgacatgactaacgacaagtcacagacagcccggtgccctggcccctccttgctctactttcaaccctgagtttctccaggacgaagcctcggattggtgctgtcctgtcctcttttcaggacctcctcatactcgctttttttttttttttttttttttttttctgagacacagtctcgctctgtcgcccagactggagtgcagtggcacgatgttggctcactgcagcctctgcctcccaggttcaagcaattctcctgcctcagcctccagagtagctgggattacaggcgcccaccaccacacccggctaatttttgtatttttagtagagatggggttttaccatgttggccaggatggtctcgaactcctgacctcaggtgatctgcccaccttggcctcccaaaatgctgggataacaggcatgagccaccacacccggcccttgcttgcttttaagaggagaacaggaaggccacaagctcgccgcctctgggattagtgcttaattagtaatatctgtgccatttttatttcttgttacaggcagccgcagggtcctccagttcctcctgcttgctttctgtgtcctgactgaaaatcacagactgccctgacctctgtggctcagccagctgcaggtttttccctacaggcttgaaccagagcctagaacattcccaggcactgataaataccgaaagccagcccaggccctgagccaaaatccttaaaccctcacataaactccataccctgacccccttgccgaggacacacctggctgtagaacacgccttttctctgatgcccattgcaaggacactgaagcccaccctgcaccgaagaccccctggaaaatgctttggactcatccccctggcatttagggttcctttctttggaatcccaaccagccccatctggggacggttcagggcactcccttgtgggaactcctctgctgctgcttttggggtgactgtagctgtgggttcagtgggatgaaacagaatcttctcactattcacaacagcaaagacatggaatcagcctaaatccatcaacggtagactggataaagaaaatgtagtacatatacaccacggagtactctgcagccataaaaaagaatgagatcatgtcctttgcagggacatagatggagcaggagaccattatccttagaaaagtaatgcaggaacagaaaaccaaataccacatgttctcactttataagtgggagttaaatgatgagaacacatggacacatagagcagaacagacactggggcctattggagggtggagggtggagggggagcagcagacaaaataactatcgggtactagcctgggtgatgaaataatttatacaacaaacccccgtgacacaagtttacccaaagaacaaaccggcacatgtgcccttgaacctaaaagtttgttttcttgagagagagtctcgcactgtcacccaggctggagtgcaatggtgcaatcttggctcgctgcaacctccacctcctgggttcatgcgactctcctgcctcagcctcccgagtagctgggattacaggagcacaacaccacacccggctaattttttgtagttttagtagagacaggggtt[143 bp omitted]acttctagttgtggcaaggaacacaggtttcccacgcatgaggaagcgcgcttgtgaagtacagtagtgacggaaggatgtacttaaagaaaaagattagattaacagggttccttttaaagtgtatttatgaaaaatgcaaagttcagtgagatgtgtgtgggaaggagaaaaatcgtgcggagactcaggggtgagcaaaagaacgcaagtgctggaaacacgactcaatctctaagagcccttgaagctgccaggaccctgcccgtccggccgcccatggggatgagggtcaagtgatgtgtgatttcgctcgtgtgaaatgtccagaacaagccaatccacagagacaggaagtgggttcatggttgcccggggcttgggagtgatggttgatggggttgctttttggggcgagtgaatgttctagaagtagacaatggtgatggctgcacaactctgtgaatgcgtgactaaaagccactgagtttcacaccttcaaaagtgaaactgtgcaatgtgaattacatctcaatttttaaaaagcaccctgggccaacaggaggggtgggagggatgggagggcctgggcagctagtccacagggactctccaggagagctggagctttccaaacaggaaatcaaagccacagacttgccaaggacaccagggccacctccttctaggctgattaatcaatgatcaccaaatggcccctgccagcacattcctcgggcgagctgctgctggcactatgatggtgacaactggcctttgaggcaagggctagaggtgaccgccaagggctgtggatttctgctgccccatccctcctcggacctccctcaccagctctgcccctgcaaacacacctgatgccaacctgtcacccacccatgccccggtgacccaggcctgcgcaaacaccatttcccgtcactgcacgctgtggcctcgagtggctggcctggtgggggatcgtgatccacacagggctagggctctcccctggatctcagcctgggacgtcgggagacaggaattcttgctttccctttcgagggagttccagaactgtctggaaccctgtggcctcctccagccacagaagtcaccgtttgcagtggggagaggctgatccgcgtggggcgggagcggggtcgggagcgtttcccaatgctgcagtctgaggcctggaacctgagccggccccagcccatcttcccagcagcaggaaccgcacgttcccccgctgctcctgctagcctgacgctgggggctttatcatgtggatctgaaagagcctttccggaggggcccagtgattagctccacatgccccacagcaaacctggtgcctgctgaggggacaggtcccatgctttgagcagcaggccaggcctggccttgaagtctggacactgggctagtgctaagaagtgttattattactcaggggctggggggaggcctgccccgagaacctggatgtgacgtgagctcagtgctgcccctgacagtgtgaagtgacagcctggagtcgttgaagggtgaatttcaccccgaaaggggcagtctggtttttgagctactctaggtacgttctggggtttctgccaagttcatgcccactggggtgggccctcagcacctcctgtgtactgtgaggacctgcctgtcccagccccagacacacacacgagccacaggcgacccgacgatctcatctatgcggagtcaatctgaatctttgtcccggaaatttggagaaagttcctccgtttctgctggtggctagaacctgaggcatggaatcccaggcgctgtggaggggttgcggaggacaggtgggcagcgaggtggggtggacccaggcacggacagatgcctggcttctggaaggctctggttctcaggcgctgcttcctgaggtccactgggctttctgctcttgggttccatgagatgcccctctacctttactccaggagtacttcatggctcagacgagcttggagggtttctgtcccttttagcagctccacggagatttgaatgatggccctgacagagaggtgtccacatcctggggctcgggtgtggaggctacgttacacagagagacaggcctgtgcggctgggattaagtgaaggctcttgagctgaggagatgatcctggattacccaagtgacccagatggcatcatgagtccttatcagagggaggcaggccaggcacggtggcttacgcctgtaatctcagcactctgggaggctgaggcaggcggatcacctgaggtcaggagtttgagaccagcctggccaacatggagaaaccctgcttctactaaaaatacaaaaattagctgggtatggtggcaggcacctgtaatcccagctactcgggaggctgaggtaggagaatcgcttgaacccaggaggcggaagttgcagtgagccaagattgcgccattgcactccagcctgggtgacagagcgagactccatctcaaaaaaaaaaaaaaaaaaaaaaaaaaaggaggcagaggggaatttcagacagaagagaagaagaggaggaggaggaagctgtgtgaccatcaggccagaagttccaacgttgtggccacaagccaagggatgctggccgccaccagaagctgcaagaggccaggactggttctcctctggagcctccagagggagcgtggccctgaggaaaccttgatcttggatttctgccctccagaagtgtgaataattttcacaatggcagccacagaaaactcctccaaacgccctgaccaggacagcaaccccaacgggagcaagtggcccaagactgtgggcgccacaggataaaaaagaggcaacggcccatggcagccgtggtctgtacacttgtagtcgtaacagccaagctctctcaggtaactgaaactcaagccatttcagtccaatttctcccagactagagttggccagcattcttaaaggcccagacagcccaggtgcagtggctgatgcctgaaaccctagcattttgggaggctgaggcaggaggactgcttgagcctaggggctcaagaccagcttgggcaacacggcaaaacctcatctctacaaaaaatacaaaaaattgtctgggcatggtggcacgtgcctatagtcccagctacctggagggctgaggttgggatgatcacctgagccagggatttccaggctgcagtgagctgtgattacaccactgcactccagcctgggcaatggagtgagacctcatctctaaaaaaaaaaatgaaaaataaaaggaagacagtaaatgttttcagctacgtgggccatatgacctctgttgcggtgactctcctgctgtagcttgagaacagccaaagatgtcaggaaagtaacagggaccaggaaaacctgacttctgaagacggctgtcacctgccgacccctgttctggatgattcttccttttaaattctttgtttgccagaccaccatctgattcccacacaagtctgtctgtggagagggactgcgctgatggcggaagaagacagccacctggtgtccacctcggtcactgttgttagcatgtggtcagcctcaggcagaggatgacggccgttcactggttccaatgctggctgggggctgcagcacacgcgggcctgggctcaggggctgaggacaccaccatgagtcccatggatgagtgcagcggtctggacaaggatcccagcgccaccccacccccaaggaacacttggcgatgtctgaggacatctgtggttgtcaccactgggatgtggctgctcctggcatggagtgggtggaggccaggaacgctgctcaggaccctgcagtggccggacggccccaccccagagaacgatctggccccaatgtccatggtgccaagcgggagagacgctgcctttggtccccagccatgtgtcacgctgctttcaaagacacaggcctggctgatctctccaaggtgtccttcctcccagctcttaaggcctctgggtgcagtgggcaccatccgaatatccgctgcccacctcacgggagccaggcccacagtggctgcagaagctgctggaggacatgcagcctaacccgtgccctgaaggcactcgtggtgcagaggagcccagtcccgtgaggcactgcagacgctgcaggaggagctgcgtgcaggcacacgcccagaggaggaagtgtggatccagagcctgcagcaggggctgcaagcgcgtggcaagccgcccctgtgctgtcaccggcggcaaaccaggttctgccatccgggcggctttcccggaacctcgggatccttcttgacgcacctccacggcgagctcctcctggagttactcccgactccctctgggaatggttcagtccagtcctgtttgtcacgagccccacccagcccggaccaggtggctgggaagtgactcagggggtggacccggctgactagcactggaaacaatctccgggcttggagccacagggccggcttgagccacggcatcctggccacatggaggagcggggctgccctgtgcatggctccctgcacggctgaccctccgggggccgccccacccaccccgcggcagcccttccctgtagtcagagctgtctgtggctgagcctcgaaggacagcatgcccagggcccagccatccgagcagatcttccaactcctgtggacctctgggaacagagaggaccagggaactgtggtcccagatgctgtccccgcccaagcagcctgcagggcccggcttacccaggtagtagaggcggtgggagtggggcccagactcatccgtcttctgcacaaactggaagtcgtggggcgccttgttgacaatgaggcccgagtacttgcggctgccgtggatgatgctccggagcccgtcccacgagtgcttctgcacctggaagcgggcggccgggtcatctgtggcggctgcgtcgcctcggtcggccgttggggtcccggtggtggccatcctctcagccccctcggaattcagcgagaagctgcggggaggaagcaaagactatgagaaaggagaactgttttacctacgagctgccccaatgctgccccttgcgaggcactcaggttcttccagacgagccccacccctgccgctttccccactccctaaacacttcttgggttggtctacctctctccatgtcactaatgctgctaagattcaagccaccatcacctctcaaatgaatgatctttaaaaacattcttctttttggagatgggggtctcaactatgttccccaggctggtctcaaactcctggccacaagcaatcctcctgcgtcagcctcccaagttgctaggactgcaggtgtgagccaccatgcttggctttggctgaatgactgaaaccacctcccaccaggatgttccacatccactgccaagaccccatcacttaaaacccttcctggttttccacagtccccgggataacaaccagttctcaccaccacctcaaggctgctgtcgacccctgccaagcccttgaatctcatccttcttatccctgtgacccagccaaatgagccttcactcagctcctcaaacaggccaaattcctttccaccgcagggcctttgcacatgctggccctcctgctcggagtgcatttttcctcactttgcttaacttctttgatatatgtttatatatatatacttttttttttttttttttttttttttggagacagagtctccaaaggctggagtgcagtggcgtgatctcagatcactgcagcctctgcctcttaggatcaagcgattctcctgcctcagcctcccaagtagctgagattacaggtgcctgccaccatgcccaactaatgttttttgtatttttagtagagacagggtttcactatgttggtcaggctgctctcgaactcctgacctcaagtgatccgcctccctcagcttcccaaagtgctgggattacaggcatgagccactgcacccagcctgcttggccagcttctaatcagatctcagctgaagtacttggcaggccgtcagaaacctttcacaccatccacgctgaagctggtctttctgctcatctttcacacgccacctggctgtcccctccctccaccttcatcacagcggttatttgtgggacccctgtctcccccatgtctgtcccattcacagctgtgctcccagaaccttagctggtggctggcacgtggcaggcattccacggagcactgtggaatgattatctctcagtgggctcgcggggagacatgctgggtctcgggagaggcccgggcgtgaaggaatgaaaatccatcctggtcacctgtgctgttggcttgctgtccagccggggagatgcttggccttcactggaagttccagagcctcgggatgtgggaggtgcaggtgaaagggtgaatggcacgcccttccccaaagaatatcccactctctcctcccactcaggacactctgggtccgcaaagcagccaccgtgagtggccgccgcggtgtcacatctcccaccaccccactcccgccctcgtcacttagcacactccttgacctgactggactggccaggcaaatatttgttttacagaaatctaaacatggccgcagtgacccagttctgcgagagccagtggtctggaaagggtggcaccggggctggtctcgcttccctttgtgggctccgagtgactgccgaccttgccagaagccctgtcctccgggaccaacagcttggcttggggaagtcgctgcttgcttggaggaagtgggaaaacccgcgggagtggacagcagggactgggtgtgagagaagtaaagggcagagatgagtgggccgccttgactctgcagtgtgccagttcccagaagactctgcctcttgccaagaggagaccccacagggtaaccactgcaagagaaagggccccagcctgctttgagagggaaggggagaaagagctgcaaggatgtcaacgagcgcctttgaaagatcaggacttggccgggcacagtggctcatgcctgtaatctcagcacttcgggaggccaaggcaggaggatcatgagatcagcagatcgagaccatcctggctaacacggtgaaaccccatctctaccaaaaatacaaaaaattagccgggcgtggtagcgggcgcctgtagtcccagctactcgggaggctgaggcaggagaatggcgtgaacccgggaggcggagcttgcagtgagccgagatcgtgccactgcactccagcctgggcgacagagtgagactctgtctcagaaaaaagaaaaaaaaaaaagaaagaaagatcacgacctgcaattgtcacctcatttgggccttacttgggcttgtgacagcccattctacaggtggggaaactgaagctgggaggtcactggagcttgctcccaatcagagccgagtgaatgagcaaaaggggttcagtggaggcagcccggcccccggcctcccactgacatgctgtgtgataagcccagcaattacagcaggaaaagtcacagagtgcagcccagagaactgcccgtgccgtgctctgcgagacacccgtgtcctgtgggaaggtcccgtaagccaaggagagtagaagccacctcagcaagggacatacgaaaggctcatggggcggaagaccccttgggaaggtggcttctgagtatcacggctgtgggctgatttctggaggtccctctccaactcgaccccaaagaaatgacaggggaaaatgcttcccttgtttcatcctactccatccaggcagggccagcgtgtcctgccctccagccagaaggggcgcagtttgttagttcagctcctcctgagacagaaataaagacacgaaccaaaggacatcagcacttacagggctctcaggtcacacacaggatgtccgcgcccactgcagagctgcaggtcccctccagggcagtggggagccacaagcagcgttaggcagcggctgggaccaggaccgcctgagcactcaagaacccccactgccccaagcactgctggcagcaagcccagaaaactgagcccggggagctcctctgagcggcctaagcacccctctaagctgtgctgccccaattcaagcctggctcacggcagcaaagaaaaaatgtgaccttcggagctcccaaaggggccacccataagctgagagcctgcccggaagcacttatagacccgcgtggcttgttttcattgcaaagaacaataaaaattatcttgcctctgatcaccactgatagcccaagaagcaaaaattcgatcccggagatgagaaatgaaatgaaacatcgcgagaaacttccaggaatcttctggatgtggctagactctttagcttgagcttccagacaggccgaggcttggtgctggagcctggccctccgctgacctctcttctacccgggggcacagcccggattgcagagaggctggcgcaagagtgagggagcgagggctagcctgtgatgggctttctccacctagcaccaccctatgctgtggctcaggggagtcaagagtttacacagctgcagagatggattccaggccacttactcaagtctacctactccttccttcggccaatcagctgggtgcctctgcggcctgtgacaccaccagcaaacagctccagacctcctagcatggtctctgtcaaggctgggtggcagatctgtgatctcctttttaaatttttcattttttttaagagatggggtcttgctatattgcccaggctggtctcaaactcctgggctccagcgatcctgccacctcggtctagcaaatagctgggatgagaggggtgcaagccaccgtgcccagctccaaagctctgtgatgtctgtgtctgagctggtgctttggtggcgagcgggggcgggggagtagttggagatgggggaagtatttggacgcctagaaggaactgtagattcagtgctgactgcagttctgagttcaggccgaccacaaggtgataaggcagaaagaaaggtgggagcccctggctggcgtggggcaaggggcgtatgggggtggtgaggacagggtcctacccatgcgctggatggggaaatgcctcaaggtggactttgggcagccggcccaggccaggcaagtgcccctgcaagtgggggctgccggggaaacagcatgccaccctctgtcctacccaaactgcccccagcactgcctgggcctttagctttgatgagcaacctttacagagtcacccagcagcctgtgcccaggtgggacattaagtgtgtgcagataagggaagggacacagatccccttcagtaactgacccctaaggcatgtgcccaccagacgctgggaccacccggttttagagcccatggctgggccaatcatagcccttcacaccgtccccgtcttccccggtccattcttcaattcccttcccagctgagcatgctccattgaagcaaacaagcctaagagtattagaaaattgaatactgagaaaggttcgcagggtcgaggaattcctaccgccttttcatctcgtgccaggccctgagacatggagtttactgactgccccggggggtgcgtgtctaaccacattccatccacacctgattttagggcacttc[210 bp omitted]gaggcagaagaatcgcttgaacccgggagatggaggttgcagggagccaagatcgtgccactgcactccagcctgggtaacagagcaagactccgtcttaaataaataaataaataaataaataaataaataaataaataaaaatggactcagtgaggttgaatggcctgtccaatgtcacccagagaggaaggggagtggagccccagtctcttggagcccaaaacccacatccttacactgagatcagcagttcttacccaggagtgattctgcccccagcaaacacttggtgacatctggagacatctgtggttgtctcaactgaggggagctcctggcatgaagtgggtggaggccagggacgctgctcagcaccgtgaagtgcctgggatggccccaccccagagaacattccagccccagcgtccacagtgccgagggggagaccccgcactacgccacactgcctcctcgcttgaaataaccagaacagtcttggggacgtgctggggaagccaggggagagggaaagaaggggccttccagatcttagactgttggggaattccagaagctgggccacatcctcacggatcagggcctccgaggccaacctcaccttctccaacttccggtgttctccttgtccaggcgcagtttcttaaccttccgcattaaccgctcagctgacctcaggagggcaggggtgcctgcgggcaagtgggaggagagatcaaagggctgcaaccccagcaggtggggagtgggcgctcctgcccccttcgccccctcctcattgctccaggcagccccccaagcctccggggagcaccctgaagccaagggcattctgaagagacgatgcttcaggccctggcctgaaatgcaggaggttctgggcatttgccagagcccgtcatctttctcaacaggaggttcctttcaaggtgtaaagtccctgggagtttcaagtgactccagggacatcacaccagggcacctgctggaaatagaagaatcccaaattcctcactgtggccgttgcctgatggccctggtgaccttgcctacttgcttcacccttgaccatgaccttcggccacacttgcctccttcttgtccctcaacacacctgctcgctcctagcacacagcttctgcacgacgcaccccgtggcctgaaatgccagttcctgcttttgatatgacttgctctttcttgccctgtggctcctgataccacctcttcagaggtctttcctgagcaccccatctgaagatgctacctggcgacccccatcaccacacccagacgctgatacaatggcctggaccataattccagttgtccccttccccagggagagtggttctcaactgggggcgatttggcccctcaggggacactggacaatgtctggagacatgtgtggctgtcacaactcgggggtgaccctggcatggagtgggtggagcccagagatgctgcttagcaccccacagtgcccaggataacccacctcagagaaggatcccacctcaaatgtcagcaatgccaagccggagacccctgcatccattacttggggagaaacttgagttcaacgcctacgctcatattaatactggaataaacttcccatggaacaagcattctaaacgagggggacccccagctcctgggattcacctcctttctccctccccactcagggtgaggatttcaatgtgtgcagcctcctgggaccttagtagggcagaggatcatgggacgcagtctcttggggatccatggaatcccctaacccaggggtctcacctggggataaccggcccccccaggggacatttttggttatgacgactgggacggtgaggggaggcatgtggccagtggaggccagcgatgctgctcaaccccttacagtggacagaacagcccccctcccactcctctgccaagaatgacccaaccctaaatatcagtggcaaagctgagaaaccctgctgtgggtaagggggcactcctcacgggaatatcagttccacagggcaggccacatctatcctggtcccaacagattgcctgagcccagaccatgcctggtcctcaacaaacatttcaggttgaatgaatgagctactgtgctttcttggatgccgtctaaagtcaaaggggccccttgtttggttggtgcccaactaccttctcagacaagccaggtcccatgatgcgcagttgcccaaaggcttaaagaagagagggccagctgggtacagtggctcacgcctttaatcccagcactttggggggctgaggcgggcagatcacctgaggtctggagttcgagaccagcctggccaacatggtgaaactccagctctactaaaaatacaaaaattagccagctgtggtggtgcaagcctgtaatcccagctactcaggaggctgagacagaagaattgcttgaactcagaaggcggaggttgcagtgagctaagattgtgccattgcactccaggggtgacagagcgaggttctgtctcaaaaacaaaagaagagagggaagcacatggggacaggactgagattttaagggaagaggttaagcataaagtcaccacgaaaaatcactggccatactctcagtccagtggtgaaaagcgtgggctctggtctcagagagaaaggttcaaatcctgactctgccacttctggggaagtcgctgaacctctctgagcttccacttccccagcgagaacatggtatgacagtatctacgcctggggccaccaagggaattgaatgagactgcacacatacagcttttaacacagtgtctgatgtagcacaaactaaatgacagctagcattgtcaactaaacaagatactcaaaaccacaggaagggggagactcaaactaaagtcctttcagggccagaatccacaccatttactgaccgggtcaggcagtgtaggtggatccaggcacccctccaccaaatcctgctgaaatcagcactctccccttcctctcctcaaagccttcaaaaagctccttccaggggcagctagagggggacaggggtggaaagaaaagcctccagcaggcgcacaaaaaactgcagccactgccctgcggaggacaaccatccagggccatagaaaaccatttcctgcccatgtctatattctagagcaggcaaaggaatcccaccagcccacaccccagccttcctggctgccaaaccccagcacaactgaccttctaaagggtccagagagcctccattccagctgcaggcgtgggacacagacctttataggataaacatgtcatgaatgtggcaggttaatggaagcaccggccagccgttcagcctcccccactcaggagctgcagactgtcaggcccgattctacctggctagattctagctctgccttgaagccctgcagcactgtctgcatgccctggacagaatctgggagagaagccatcccacgggccccgattcccctgggacccagcagaggaatgcagggattggtgcctacggtccacaccccctgggctttagtcccagctcctcgaaagcaggttggttcttgcctgggaggcaagtgacttcctcctggggcccctggggaagaccagggggtgggggccaagggaatagaccacttttgatggctcagaggcagcgtgaacagggaagtgtcagggctggcctaaggctgtgtgggaagaaggtaggcggttggacaggcctgagaagggaggctgagagaagggggctgaaccctgtgggctggacccttggaagacagctatgctaaccactacaccaccaacgcctcggcaggaaaaagagtctctggatacccttaatagagggatcaagtagggttgaggatcaggactggattggggagaccaagcctcggggcgaaggttggaggaagtggtaaaggagtgaggacaggatgcaggtcgagggaggtggcctctgtgcatatacagcatttgcatggggagagggaggagatcgggacctccagagcctgcacgaaaggggagagggtgtcaaggtctgcagctacgaggacgttcttgggtgcggccacctccggaaggggtcagagcctggtggcctgggcagcaacgggatgggtggggaagcccatcagggaaggggagaaactgggaggtggcctggccagcgcaggaatcggggagggaaagaaggtggaggagggcctggggcggagaggaaacgaggcagggggccggagggacccacagacgggtgcatggaggctccggggtgcggggaggccaggcgatggcgagggcagggtcagggccgaggcggggccggtcaatggcgggttcagggtcgcggccggggcgggacgaggcgcgcgggcgctgctcaccgggacgtggggcggcggccggactgggcaggtcgtcccgggtccagcggcgcctcacggtcgcggctccatgcccgggactgcgaccccggaagtggcgggagcgggggacgacagccgcggcggacacaggggacccgccggctcaggcacctttgacccggaagttgagcgacccaggcggcggcctgggattggacaccaccaggcacgtaccaaggcgtccgcggcgcttgggggggagcccgcggcgcggcggcctaaggtgcgtaacgccccatgaacgacatcttccggtgggttagggagagacacccccctgtgacttggtatcactcagtcaaacccatgatcccccactattaaggatatccggagaggatgctacctatcagggcgttggtggtatagtggttagcatagctgccttccaagcagttgacccgggttcgattcccggccaacgcatgcggtaccacttttgcgagtttgaaattttcattttagttttgagacggagtctcgctcggtcccccaggctggagtgcagtggcgtgatctccgctcactgcaaccaccacctcccaggttcaaacgattctcctgcctcagcctcccaagtagctgtgattacaagcgcacgccaccacgcccatctaatttttgtatttttagtagagatggggtggggtggggcggggtggggcggggtgggggggggggggcggttcaccattttggccaggctggtctcgaactctgacttcaggtgatccgccctcttcggcctttcaaagtgctgggattacaggcgtgagccatcaatcacggaaaatttttttaaatcccataaaaatgtctaaaaggcaggaggaaggcggaagagaaagaatgggactagaatcgttctttcggtgaatttcaaatagtattactctccggttaggaaaaacagctgacctgtttccgcccgggatcgaaccggggacctttcgcgtgtgaggcgaatgtgataaccgctacactacggaaaccggtaggcgtcagggttctttaaattctcctatagagataatgttgcagtgatagttgcgttgtcccaccaaagaaacactggctacagtcagctaaagcaatatccgctcttcctgaatatctgttattgtatttgatacagtagagaccgaaagaaggaaaataaggaagacaaaaagaaatccaataaacaccctttccaacacacccacccacccacacacatgtttatcactttatcataaatccaccttccattaaaacaatgcacgtcaaacggcccacaaacccatccggggtcaaatgaagcttttcatctcatagatatcaatctatacttgatatcacattagtttctgcagatattcaccattttgctttagatcaaactacttttttgtgtgttttgttttttgtattttttagagagagtctcgttctgtcgcctaggctcgagtgcagtggtacgatcatccctccctgcagcctccacctcctgggctcaagcgatcctcccacctcagcctcctgggtagcttggaccacaggtgtggaccaccacgcctggctgaattttaaaaaatgcgtttgtagagacggtgccttatagctgggactacaggcgtgtgcaaccactcccagctaacttttgtattttttgtagagactagagggcctgcactatgttgcccaggctgctttccagctcctgacctcaacgtgattcgcccgcctgcagcctcccaaagtactgggattacaggcatgagccaccgcgcccgaccccaactacactgtaaaagagctttctgaaaagaaaaactgtgtgtgtatgtgtttaccttccgatggagttttgctcctgttgcccaggctagaatgtagtagcgcaatctcagctcactacaacctccgcctcccggattcaagcgattctcctgcctcagcctcccaagtagcggggattacaggcacccgccaccacgcctgactatattttgtatttttactaaagatggagtttcgccatattggtcatggctggtctcgaactcctgacctcaagagatccgcccgcctgagtctcccagagtgctgggattacaggcatgtgccaccacgccaggcctctttattttcttaaagagacagtagaagaggtgggaagatgatggcaagaatttagaatcagactgctgtaaaattctgcacaccctcactcctgcggggctgggattagggtgaggagactaaagcattgtaaggcactggcaccaggtgcaaaaattaaggtggtgccaaaaaactcaataatcaagataaataatatttcaatacatctttttttctctctctgttgtcgctggagtacagtggcacaatcttgacttactgcaacctccacctcccaggttcaagctattctcgtgcctcagcctccctagtagctgggattacaaacatgagccactatgccaggctaatttttgtatttttcgtagagatgggattccaccatg[262 bp omitted]actcgagaggctgaggcaggagaatggcgtgaacccgggaggcggagcttgcagtgagccgagatcgcgccactgcactccagactgggcgacagagcgagactccct[140 bp omitted]ggtgaaactccgtctctactaaaaatacaaaaaattagccgggcgtggtagcaggcgcctgtagtcccagctactcgggaggctgaggcaggagaatggcatgaacccgggaggcggagcttgcactgagtggagatcgcgccactgcactccagactgggcgacagtgagactctgtctctaaataaataaataaataaataaataaataaataaataaatttaaacaaataaaaataaaataattactggtaaataactccatcatgaacaaattgtcaaaagtttccattgaggcaagttttcgtagagatttgccaaattctattggagtctaaaatgtgtacctctctgtgcctgtttttatgtgttttgaggggtttttgggtgtttttgagacagggtctcactgtcacccaggctggagtgcggtggtgcaatcacagctcactgcagcctcgacctcctgggatcaagggatcctcccaccgcaagcctcccgtgtagatgggaccacaggtgggtgccactatgcctggctaatttttaaaaaaatttttagtagagatggggtctcgctatctctcccaagctggtctcaaactcctgcgctcgagtaatcctcccgacttgggttcccaaagtgctaggattacaaggctgagccactatccctgtcctgattttatgtattttaatggttatttctctcagaatgctgttgaaaccatattgaaacattaaaagtagatatattaaaactcacaacattaagaatgtattctaggccgggcgaggtggctcacgcctgtaatcccagcattttgggaggccaaggcgggcggatcactgaggtcaggagttcgagaccagcctggccaacatggctaaaacccatctctactaaaaatacaaaattagccgggggtggtggcacacgcctgtaatcctagctactcggaaggctcaggcaggagaacagcttgaatgcaggaggcagagcttgc[132 bp omitted]tataaaaactagctgggtgtggttgtgcgcacctgtagttccagctacttggaaggctgaggtgggaggattgcttgagcccaggaggtcaagactacagtgagccatgatcatgacaagcactccagcctgagtggtagagtgagaccttgtcaaaacacacacacacacacacacacacacacacacaacaacaactcactatgataattgtgcttttctggcttttttttttttttttttttttagacagagacggagtctcgctctgttgcccaggctggagtgcagtggcgccatctcggctcactgcaagctccgcctcccaggttcaagccattctcctgcctc[184 bp omitted]gtggcttttttgtgtgtgtgtatttttttttagatggagtctcactcttgtccccgaggctgcagtgcaatggcacgatctctgctcactacaacctccactacctgggttcaagctattctcctgcctcaacctccagagtagctgggattacaggcacccgccaccacgcccagtaaatttttgtattcttagtagagacagggtttcaccacgttggccaggctggtgtcgaactcctgacctcaggtgatccacccgccttggcctcctaaagtgctgggattacaggcgtgatccactgcgccgagcccatgttccctttttataaggacacccatgatattagactacagcccaccctaatgatctcattttaacttcattgcctttgtgaagaccctatctccaaatagggtcatgttcttagatactcaggggttagaattctgacttacctttccggggagtgggacacaagagagggattagccattgtttgatgaattgcaactaattaaccaatcccctattgtcggtcttctaatgcttccctgttaactaagctgccacgaaatcctggttgctacaatttatcataatgttgcccatttacgtgtctgtttctgcttagagcaaaacccactgaatctaatgagatgtcctcattctccagttccactttctcttctccaattatctttttgttttgttttgagagagtctcgctgtgtcccccaggctggagtgcaatggggtgatcgtggctcactgtaacctccgcctcctgtgtttaatcaattctggtgcctcagcttcccgagtagctgggattccaggcgtgccaccatgcccggctaatttttgtatttttagtagagatgggttttcgccacgttggccaggtggatctcgaattcatgacctcaggtgatccactggccacggcctcccaaagtgctgggattacaggcatgagccactgcacccagcctccaattctactttgagctaaggtgactatacacctggctttggctaggacggtcccggtttatgcccccaccccctcagtgccccctttcttgctcaaaagtgtgttgattgaccaggcgcagcggctcacgcctgtaaccccagcactttgggaggccgaggtgggcggatcacctgaggtctggagctggagacctgcctggccaacatggcgaaaccccatctctataaaaatataaaaattagcctggcgtggtgtgtgcctgtaatcccggctacttaggaggctgaggctggagaatctcttgaacccgggaggcagaagttgcagtgagccgagatcgcgccattgcactccagcctgggtggcagggcgagactccatctcaaaaaaaaaaaagggtcctgattttgactataaattatagggtcgctctgtcttgagcttcaacacagactcccgcatccaccactccccagaaactcttctcactgatgaccctcctgcatccggttccaaggtcagtctctccgtcccagtcctctccatggcatctgacccgccggatccctcctgctccggggagctctgtcctcagaccatgcacttccctccaacctgtctgggacatccttcagtcttcccttctctccattgctggccaagggctgagtcctccagcctcctccctcctccacccacacccctccccagcgggctccaaaccccgtctacagccagcatcgcctacagtctcatctccagcctgagtctcccttgaagtccagactctgttcagcagcccctgatgtctccacatggggggctcatggggtctcacattcaacgcagtcacattgggccccactggacccccaaaccattcctcccatgtccaccacctaggctgagggcaggtccgtccttccagggactcaaccagaacctgggagtcaccctgggcctctactctcccacccatatccaatcactcagtaaatttgattaacactgctttcaaaatgcacctagataggccgggcgcggtggctcacgcctgtaatcccagcactgtgggaggcccaggcgggcagatcacctgaggtcaggagttcgagaccagcctgacctacatggagaaaccctgtctctactaaaaatacatagctggccgtggtggcatgtgcctgtaatcccagctactcgggaggccgacacaggagaactgattgaaccgaggaggcagaggttgcggtgagccaagatcacgccattgcactccagactgggcaacaagagtgaaactccttctcaaaaaaacaaaaatgcacctagaatctaatcactgctttcccactcagtgcctgttccctggtccagcctccagcacagctcacctgagccaacacacagtcacccctacctggaccccagttcctgccctcaccccccacaggctgtctccccaccagcagccaccagagggtgcttttgagcacctgagtcacttcctatccctcctctgctcacaaccctccatggctcccacctctctcagggtcaaagcccaaggcctccccatgtctcaccaggtctggcatgacctgccccatcccctccctgccctctcctcttccctttctccccattgctcactctgctcctcctcactgttcctccaacacaccaggtgaagtcctgccgcagggcctttgcacaggctgtgccctctggtggacccaggtatttccaaggctcactccctctcttccttcaaaccttggttccaaggttacctcctcagagggcctttcctgcctgagcctggctaagtggtagccagtcctacctggccttggaactcacaaacttggtacctatcatttatacatgtccttccagggcggcgcagtggctcacgcctgcagtcccagtactttgggaggctgagggtggcagatagcttgaggcctggagttcaagaccagcctaaccaacacactgaaaccctgcctctacaaaaaaaaaaaaaaatacaaaaattggccaggcatggtggtgcatgcctgtaatcccagctacttgggaggctgaggcaggagaatctcttgaacctgggagggggaggtttcagtgagctgagatcatgccactgcactccggcctgggtgacagagcaagactctctctcaaaaaaataaaaataaagatgtcctcccaatggctttttagtctctgaaataatcacatttgtagatctgtttgctaattttgcctccatttccctagccaggctatgagcttcactagcagtattttttgttatttattttagtccattttgtttcctattgtgtcactaagtctcagtaaacatttgttgaaattatgaacaaatgcacagccggccaaaggagagaaaaggcctggggtttggagatggtagtgaagtaatacaggtggacttcctggtggagggggcgaacctgggagaacatgttacctcccccagaagccccatcaaggcctgagaactcattaatctgccaaaacccaaccaaccaaacaaacaaaccaaacactcctttaaaactttttcttggggccgggcgcggtggctcatgcctgtaatcccagcactttgggaagccaaggtgggcggatcacttgaggtgaggaatttgaaacccacctggccaacgtggtaaaaccccctcctctaccaaaaatacgccaattagtcagtcgtggtggcgcgcgccggtaatcccagctacttgggaagctgaggcaggagaatcgcttgaaccagggaggcggaggttgcagtgagccgagatcgcgccattgcacgccagcctgggccacagcgtgagactctgcctcaaaataaaataaatcagccgggcgcggtggctcaggcctgtaatcccagcactttgggtggcc[134 bp omitted]aggc[138 bp omitted]tccttgaagctctctcagggcagccaacatgctgtgcgactcctggcaagttacaccattcagtgcctatttgcctgcctgaagtcaggtagatgtttcagaggtggctacttcacagaggcggcttgtttaaaaggaacaatagttccctctttccactaggtgtcagcagaagcacagctggcctcactcggcatctctccacccctacccccgtaaccacccccgtcccatcctctccatctccactccgggccccagacctcagcatctcaaattcagacacttccctccctcagtagacacccttgtatttgcagacaaattcctgtccccaggcaggccttcgcagcaggcatggttggtggcctgtcctacctggtgtccgatcacaccaggaaacttcagcaagggctgcagagaagaggaaagagcaataaaagaaggaaggtacctagggcctgggtgcggtggctcatgcctgtaatcctagcactttgggaggctgaggcgggtggatcgcttgaagtcaggagttcaagaccagcctggctaacatggcgaaaccccgtatctattaaattacaaaatcagctgggtgtgattgttcacgcctgtaatcccagctacttgggaggctgaggcaggagaatcacttgaacctgggaggccgaggttacagtgagccgagatcgtgccactgcactccagcctgggcgacgagagcgagactccatctcaaaaaagaaggaaagtacatagggattcaatgtttccagccaggaaacatttcatacaaatgtttgtgttcaagaataactttgcatggaatagcggaaatctgtattgaaaattgttctaagaaaatgtcactttttgcctaggtacagtggcttacacctgtattctcagtactttgggaggctgagatgggaggatcacttgagcccaggagttcaagaccagtctggataacatagtgagacccccgtcttagcaaaaacaaaacaaaacaaaacaagacaaaacaaaaaaaaccttagctgggcatggtggtgagtgtctatagtccccactacacaggaggctgaggtgggaggattgattgagcctggaagtttgaggctgaaaatgagctataattgaatcactgcatcccagcctgggcaacagagttagatcccacagaaggaaagaaagagagagggagagagaaagagagagaaaggaaaagaaagagagagagaaagagaaagaaagaaagagagagaaagggaaagagagaaagagaaagaaagagagagaaagggaaagaaagagaaaaggaaagaaagagagagaaagggaaagaaagagagaaagggaaagagaaagaaagagaaagggagagagagagaaagagaaagaaagaaaggaagaaagaaaagaaagaaagaaagagagagagaaagaaagaaaagaaaagaaaagaatggttacactttaaactcatttagttcccccaacaaccccattatgcaggtgctatccagaatcatcattgcccttttaatgggtgagaagacagagggacagggaggttaatttaacctgctcagggagcgacagagaggttaagtaactcaaccaaggtcacccagatcatgagtagcagtattgggattcaaagccaggtggtcaggctccaaagtccatggtgcatgatgagactgcattcaacacagatgaatttcaaggtaatcaaagtaattaaaaataaaataagatataataaaagaccattgaattgaaccagccagtagaagaaccagcctggaccttaaaagggtcatggggccaggcacagtggctcacacgtgtaatcctagtactttgggaggctgaggagggaagatcgcttgaggccaggagtttaagaccagcctgggcaacagggtaagaccctgtcactaccaaaaatacaaaaattagcccgtcatcgtggcatgtacctgtagttccagttactcaggaggctgaggtggaaggaccgcttaagtccaggaggctgaggctgcagtgagctatgattgcaccactactgcactccagcctgggtggcagagtgagaccctgtctcaaaaaaataaagtggggggctgggtgccggtcatggtggctcacacctgtaatcccagcactttgggaggctgaggcaggcagatcacctaaggccaggagttcaagaccagcctggtcaacatggtgaaaccccatatctactaaaaatacaaaaattagctggacgtggtagcacacgcctgtagtcccagctactcaggaggctgaggtaggagaatagcttgaacctgggaggtggaggttgcagtgagccaagatcacaccactgcactccagcctgggtgacagagcgaaaccctgtctcaaaaaaaaaaaaaaaaaggaacaaagagagaaagaaacagagagagaaagagaatgaaagggaggagagagggagtgagagaaatagagagaaagacagcgattccagaaaccatctcactcacttctcgccctccctggcctcttcaacagtagtatttcaactgagtgg[132 bp omitted]accaacatggagaaatcccatctctactaaaaatacaaaattagccaggcctggtgacacatgcatgtaatccccgctgctccggaggctgaggcaggagaatcgcttgaacccgggaggcagaggttgcggtgagccgagattgcagcattgcactccagcctgggcgacaagagtgaaactctgtctcagaaaaaaaaaaaaaaattaaatatttattccctcagcatcatatctacaataatcccatttattctcaatgccacagtggcaattcttcgatggatcggccagggagatttgaagtacccgggaagccctcattgtactacatctttgtaattttcattgatttatgaaacgatgcctgttgtctgcagcccctgctaacacggtcctctaagattactgccatttgggggtgtttaaatctatcatacatggtactataataactacaaccttaacagcaga[187 bp omitted]tggtggtgggcacctgtagtcccagctactcgggaggctgaggcaggagaatggtgtgaacccgggaggtggagcttgcagtgagccgagatggtgccactgcactcccgcccgggcaacagagtgagactccatctcaaaaaaaaaaagaaaaaagaatttaatcctcggcaaccaccctatgaggtgtgattaatattattgtttgtttgtttgggtttttttttttttctttttctttttatacacagggtcttgctctgtcgcccagaatggagtgcagtggtgtgatcgtggctcacagtagcctggaactcctgggctcaagtgatcttcatgcttcaatctcctgagtagctgggagcagagacacatgccccaatcactgaaatttgccccaaatcactcatataggggcagggtcaaaacacaaacctgtttctctatgagggctgtgtcctgtgtccacattatcacttaatatcagtgagtttcacctgggggtgattctgtccccccacaggggacacttggccatgtctggggacatttgtggtgggtgcccctggcatggagtgtgtggagtccagggatgctgctcagcatcctgcactgtccagggcagcccccaccccacaggatggcccaggcctaaatgtccacactgccaagggggagagagcctggcctggccctcagctcccctccagcggcccctagcccctatgacccaccatgggtggtgaggcttccctgtgttgctggccttgcaggctgcacccctgtggttggtttcccttagctctccccacattcctataggtggaactcctttctggtacccagtctggaacagaccagcctcgttccgccgtccccctttgggaggccaaggcaggaggatcctttgagcccaagaggttgtggctgcagtgagctgtgtttgtgccactgtactccaccctgggcaacagagcaaga[142 bp omitted]tgaaaccctgtctctactaaaaatacaaaatttagccaggcgtggtgtcacacgcctgtagtcccagctacttgcgaggctgagacaggagaatggcttgaacctgggaagcagaggttgcagtgagccgagattgctccattgcaatccagcctgggcaacaaagcaagactccatctcaaaaaaaaaaaaaaaaaaaaatatatatatatatatatatatatatatatacacacacacatatacatatatatatacatatatatacacatatacatatatatacatatatacacatatacatatatatacacatatatatatacacacatacatatatacacacacatatatatatatatatatatacacacacaccatcggctaggcatggtggcttacacttatagctccagcactttgggaggccaaggcaggaggatgtctagagcccaggagttaagatcagcctggcatcacagtgagaccaatctctacaaaaaattcactggcatagtggcgttcgcttgcggtcccagctacttgggaggctgaggcgggaggatggcttgagcccaggagtatgagaccagcctgggcaacatagcaaggcccggtgctctacaaataataaaaaaatgagacaggcatggtggcacacacctgtggtcctagccacttgggaggctgaggcaggacgatcacttgatcccaggaggttgaggctgcagtgagctttgatcgcaccactgcactccagcctgggaacagagcaagaccctgtccctaaaaaaaaaaaaaagaaaataaaaaaaaaaagagagagacagagagagaatgacagggaggggatagccaaggaaggggtgaggccagaggtgtctccagttaaaacaggggcagtagtctgatttgcagatgccaccatggtgcagctgggcatgcaatcccctggcagggttcaatgctatgcccatttcctagaaggcaaaactgatactctgagggcagagctgttctattctttccttccttcccctagctggggggaagggagggctccccagaggagaggagagctgggtggcaggggtgggggtgggagagatagctgattaggggcccgtttattagctgtaattgctgtctcctgggctgaattagacgaaattacagccgctggcccttcaggatgtcgagctctcggcattgtctgtggaagcaatccaacggcggaggggagtggagagggggatggggggtgcctcttgacaatagagcccccgaattagccaggcagggaggcggggaagctgcggcctgaccaccccctccccaccaccctaaagagctgtcagagtctcaatgaattcagctccacgaaggccaattaaagatagcagggggcccagtgggctgggacaggaggtgggagaagaggggggagggggaccacatgaaccagggtagggaggtgccagcgaggggtgcccaggtccacagagatctgtgtggagagacaggctgtgggggcatcgtggaccccccaaatattgaagggggtggggttctattcttcctcctcacactaccctttgccccccatgcctgattagaaagatggggttgccctggaagagcaagaggagccccccaggagaagaagagacagtgggacccacccagcaagcactcctcctacctctcccgtggcccttggctggtgttccttggtcaacaagcatcagctgttctgtccctctgttagccactgctcacggggccacttccagtagcatcctgagggaaggccagccacacctcttggaagccctccaggattgcctaaggcctcaccacagagagtctccaatccccaggcaccctcccttccccatctcctctctaatctaacccccgctccccgtcttccaaggaactccccctcctctgtgagccccacctctagacctcctccctttcttgttctttcttttttgagatggagtcccactctgtctccaggctggtgtgcagtggtgtggtcttggctcactgtgacctccacctcctgggttcaagcgattctcctgcctcagcctcccgagtagctgggattacaggcgcccgccagcacgcctggctaattttttctatttttagtaaagacggggtttcaccgtgttagccaggatggtctcgatctcccgacctcacgatctgcccgctgcagcctcctaaagtgctgggattacaggtgtgagccactgcgcccggccagtctctactaaaagtttaaaaattatctgggcatgctgggcacggtggctcatgcatgtaatcccagcactttgggaggccgaggcaggcggatcacttgaggtcaggagttcgagaccaagctagccatcatggtgaaaccccatttctactacaaatacaaaaattagccgggcgtggtggcatgcacctgcaatcccagctactcgggaggctgaggcacgaaaatcgcttgaaactgggagggggaggttgcagtgagccgatattgtgccactgcactccagcctgggcgacagagtgagacttcctcacaaacaaacaaacaaacaaataaaacctctggaccccaaagcttggtggagcttcctgattggtgaacatattgatgttcttccaggagaggagacacactctaatgcctcaagaagaggacatggggccgggcacggtggctcacacctataatcccagcacactgggaggctgaggtgggaggatcacttgagctcaggtgttcgagaccagcctggccaacatggtgaaaccccatctctactaaaaatacaaaaattagctgggtgtggtggcgggcaactgtagtccaagctctggcggctgaggcaggagaatcacttgaacctgtgaggtggaacgctgtgagtcaaaatcacaccactgcactccagcctgggcaacagagagagactccacctcaaaaaaaaaaaaaaaagacatggaagctcttttggggaccctcccagactttgtcctatgtgtctctttgtttggctgtttctgacttgttttgttactttttaaatgtttttttagagacatgatctcacttcgttgcccaggctggagtgaagtggtgagatcataactcactgtagtcttgacctcctggcctcaagagatcctcctgcctcacactcctgaggagctgggactacaggtgcatgctatcatcgctggctaatttttttttttaattttttgcagagatggggtctcactatgttgcccagggtggtcttgaactcctgagctcaaggtatcttcactcctcagcctcccaaagcgctaggattgcaggcgtgagccactgtgactggcctctgacttgtggggttttttgcttatttgttttttgtttttgagacggagtctcactctgtcacccaggctagagtgcagtggcgcgatctcggctcactgcaacctccgcctcccaggttcaagcgattctcctgcctcagcctcctgagtagctgggactacaggcgcccaccactatgcttggctaattttttgtatttttagtagagacggg[147 bp omitted]gtctcactctgttgcccaagctgcagtgtagtgatgcaatcatggctcactgcagcctcaacctcccaggatcaagtgatcctcctgcctcaacctcccaactacctgggactacaggtgcacagcaccacacacagctaatttttgttttttttttttagaggtggagttttgctacgttgcccaggctggtctcaaattcctgggttcagtcctcctgcctcggcctcccaaagtcctgggattacaggcatgagccattgctcctggtgacgaggacagccttgttagggactgtgcccataacttgagtctgttataaccccaggcggttaatgtcagaattgcattgtagagcctgggtaatgtggcaaaatcctgtctttacaaaacatcaaaaaattggcccggcacagtggctcatgcctgcaataccaacactt[134 bp omitted]gaggcagaagaatcgcttgaacctgggaggtggaggttgcagtgagccaagaccatgccattgcactccagcttgggcgacagagtgagactctgtcttaaaaataaataaataagtaaataaaattaaaaaggaaaagaaaataatgtattttatttattattattattattattattatttttattcttcttattatttttttggagatagaatctcactctataccccaggctggagtgcagtggcatgatctcagctcactgcaacctccagctcccgggttcaagtgattctactgcctcagcctccagagtagctgcgattacagacgcccaccaccatgcctggctaatttttgtattgttagtagagatggggttttgccatgttggccaggctggtcaagaatatattccatttattttatattatatatagtacatatgtagagtattagctagagtattctataatgtatagtaatatgtatctattgtctatcatataaatcacatatactcacaccaagagtgtatcttttattttttatttttgtgatgggtcttgctctgttgcccaggctggagtgcagtggcgcaatcatagctcactgcaaccttgaactcctgggctcaagcaatttgcctgccttggcctcccaaagggctaggatgacaggcgtgagccaccacgcccggcctctgagtgcctctgtgttgtgtgtgaagcccagtttgctggaatgttctggtgttacaactgttccagcctgaccgtgtgtggcagtgggagtgtatgtcatgatctgcgcttctgtgactgtgtttcgtggctacatttgtgtgtgtgtgtgggcatgttcgtgggcatgtggaggtacgttcgtgtcccctgtgtggttgtacttgtaaccctgcgtgtgtgtctgtgtgtgtgtgaacccgtgaccatctgaaagtgcacggccgagcttgtggctggggtgtgtcgggcctctgtgctccgaatcctgtcccgaggctgttgcacgtggccttgggcgtcctccagagagacagtcatgctccacggccacgtgcgtgcgtgtgtgtgtgtgtgtgtgtgtgtgtgtgtgtgtggctctggcacatgcctgtgtgaccctgcagggctgtgtccaggggacctagggggacaggagagagctcaggggctgtctgagccgtagggggtgtctgtgattttcagtgtgtgtggccctgtggtgactctgagtggcaggtacatgtgcatttagaagaagcccctggggcccagcctcccccagcccccagccagcctggtgcatgttctcaggacacacccaggcctgaagagctcataagtggagatgagtccccaccagccttgcagtcctccgttccctctcctcctctcctttcctccccctttctcccctcctctcccccttggtcccctctccctgccgagtacaaggggagaagcagcctctgccatcagctggaacacgcttaagtggcccatttcctgggaggctgggtggcctcaccagccattagggtaatgagccgcatgctgtcccccatccagcgccctggtaaccaaggaggggggcattgctcgctctgcagggctgcgttttcctcctcctggcagggatagggatggggagcagggagggagggccctgcagacacagaccaaggccagaggggagggacacagcagagattcacatacaggtcggttggaggcaggaagggaacaagagacagagaggagagggagagacagagccagagatagactgagagcgaaaatggggtggagacagagatagagagagactaacgaccaggcaaggaggaggaagacagggaaatgagagagaagatgtttggggggtgggagagagaaacaggcagagagacagacaggaaaagaaccagacaggtgcagactcacagatcaccagggagatggccagggacaaccgaggcaggaagagagacagggaggcagcaggggcaggcaggagggagagagagaaagaaagagagagcgaatccaaaaaagagacagagacaaaaaagggacagagagagagataaaaaagagacagaggtatggtgacttatgtctggaatcccagcactttgggaggccaaggtgggtggaccatttgagcctatgagcttgagaccagcctgggcaacatagggagaccctgtctctaccaaaaattttaaaaagtagtcaggccgggcacggtggctcacacctgtaatcccagcacttcggaggccgaggtgggcagatcacctgaggtcaggcattcaagaccagcctgcggccaagtgcggtggctcatgcctataatctgagcactttgggaggctgaggcaggtggatcacggggtcaagagattgagaccatcctggccaacatggttaaaccccgtctctcctaaaaatacaaaaaaattagctgggcatggtggcacgcgcctgtagtcccagctactcaggaggctgaggcaggagaattgcttgaacccgggaggcagaggttgtagtgagccaagatcgcgccactgcactccagcctgacgacacagcgagactctgcctaaaaaaaaaaaaaaaaaaaaaaaaggccgggagtggtggctcatgcctgtaaccccagcactttgggaggccgaggcgggcacatcatgaggtcaggagatcgagactatcctggctaacaaggtgaaaccccgtctctactaaaaaatacaaaaaatgagccgggcgtggtggcgggcacctgtagtcccagctactcgggaggctgaggcaggagaatggcgtgaacccgggaggcggagcttgcagtgagctgagactgcaccaaggcactctagcctgggtgacagagtgagactccatctcaaaaaacaaacaaacaaacaaacaaacaaaaaaaccagcctggccaacatggtgaaaccccatctctactaaaaatacaaaaatcagctgggcatggtggcaggtgcctgtaatcccagctaaggaggtcaggagtttgggaccagcctggccaacatggtgaaaccccatttctactaaaaatacaaaaattaggccgggcacgggaggctaagacaggagaatcgcttgaacccgggaggtggaggttgcagtgagccaagaaggtgccactgcactccagcctgggcaacaaaagcaagtctgtctgaaagagaaaaaaaaaagagtcaaggtccatgttacagtcagcctggtatatttatacatcagcacagcaaagccacactgtgacccacatatttggacacaaatgccatcctccttacaggggagtacaacattgcacccctccttttctctccaacccttctcatagcttggtcttcccaggcccagtgacatctcaaggctctgtctctcgacgatctcgcagatgactcattttttgttcctgttctagcagcaatcctgcacacagagtaatagccttccattccctcccacgcctgtccctcctctctgccctcactccagcctcctgatttcatttttctttggatatattcccagaagtgagattgccagatcatatggtaattctagttttaacttcttgagggagaaacctccttaccatttcccataatggctatcacaatttccattttcaccaacagagcaaaagggttcccttttctccacatcctcaccaatgcttgtgatgtcttgtctttttgataacaccactctaacgggtataacgtggtgtgtccttgagactttttctttttttttttgagatggagtctcactctgtcacgcaggctggagtgccgtggcgcaatctcggctcactgcaacctccacctcctgggttcaagcgattgtcctgcctcagcctccccagtagctgggactataggtgggagccaccacacccagctaatttttgtatttttagtagagatagggtttcaccatcttggccaggctggtcttgaactcctgacctcgcgatccacctgcctcggcctttcaaagtgctgggattacaggcgtgagacaccgcacctggcctaatttttgtatttttagtagaaatggggtttcaccatgttggccagtctggtcccgaactcctgacctcaagtgatctgccgcctgcctcagcctcccaaagctctgagattacaagtgtgagccactgcgcctgccccacccccctttttttgagacagagtctcactctgacactcaggctggagtacaatggcatgatcttcgctcattgcaacgtcgaactcccaggctcaggtgatcctccccactcagcgtcccaggttgctgggactgtaggcacgtgccaccatgcctagctactttttttttggtttggtttctttttttttttttttgtagagatgaggttttgccatgttgcccaggctggtctcaaactcctgggctcaagcaatcctcctccctcagcccctcaaagtgccaggattacaggcatgagccactgcgtcctgccagatgaccacccctttgaagtaatttgtttctaaaaatggctgcaattgtttccatcctcttattttttttttttttttttgagacagagtgtcgctgtgtcacccaggctggagtgcagtggcatgatatcgggtcacagcaacctccgcctcgcagggtcaagcgattctcctgccttagactcccaagtagctgggacaataggcgcctgccactacacctggctaatttttgtatttttagcagccttaaagcctggacaggcttggatggcttcaaccaacacgatattgtggaagtggtgctgtgggatttcccaggctagatcggaaaagatcagcagcttcttgtttactggacactggttttcagagctcagaggcagccgggcgtggtggctcacgcctgtaatcctaacactttgggaggccgaggcgggtggatcatgaggtcaggagttcaagaccagcctggccaagatggtgaaaccctgtctctactaaaaatacaaaaattagctgggcacggtggctcacgcctgtaatcgtagcactttgggaggccaaggcgggtggattgtctgagctcaggagttcgagaccagcctgggcaacatagtgaaaccccatctctactaaaatacaaaaaattagccgggtatggtggcatgcacctgtagtcccagctacttgggagcctgaggcaggagaattgcttgaacctgggaggcagaggttgcagtgagccgagatcgtgccactgcactccagcctgggggatagagcgagactccatctcaaaaacaaaacaaaacaaaaattagctcagcatggtggtggcgcctgtaatcccagctacttgggaggctgaggcagagaattgattgaacctgggaggtggaagttgcagtgagctgagatggtgccaccgcactccagcctggacgacagagcaagactccatctcaaaataacaacaacaaaaaacaaacaaaaacaaaacaaaacaaaaaaacacagagttcagaggctcaggcctcctcagaccctttcccccacagcgtctccacctcctggttgggcctgactgctgtttctcctctccttgtcctcatgtctctgtctctggtggggttttggactcttgtttctttccgaggtggatttctgtggttctcttggtgccttctgtctgggggtcaggatcaagctctctctgggtctctccctgtctctgctctgtgtttctctgtgtctctgtttctgtttgctttggggtcttttgctctgtgtctctgatgctctctgtctctgtctctctctgtttctttgttgttgttgttatttagagatggagtctcgctgtgtcactcaggctggagtgcagtggcgtggtctcggctcactgcaacctctgcctcccaggttcaagtgattgtcctgccccagcttcctgtagctatgattataggcgtacaccaccacaaccagctaatttttgtgtttttagttgagatggggtttcatcgtgttggccaggctgttcttgaactcctggccttaagtgatcctcccgcctcagcctttcaaagtgctgggactacaggagtgagccactactcctggcctggggtgtcttactctgtgtctctaactgtctgtctctgtctctccctgtatcttcgtatctctgtttgcatctctctctctagatctctccatctctgtccctgtctctctccatctctctgtctctctgcatctctatgtctctgtctccatctctctacatttttctcttaatctctgtctctgtctatctctgtttctgtctttctgtgtgtttagtcttgcctctgtctctctgtgttttcatttctctttttctctctatctctctgtgggtgtctctctgtgtctctccctgtatctctaactgtctgtatgttcagtcttgcctctgcctgccctctgccccacctggctctctctctctctgcatctctgagcatctgtctccctccccacctccacaccccttcaaattctcgacccccgggctttgaggaggacccccgacagtggcagatattcagacaaccagacacccttgagctactctgcccctaactccccagactgccccaggagattcgatgccactgacttttttgctgcacctcgattaaatttcctctcctccaccggtgaagcccacacctttcctaatgcagcctgaatcctgggctgcactccacattcccagcctactcccgggtcaccagatgcccgcctgcacaatgcacccctgcacctgcctgggttgcccacctgagccccgcccctccccaacacagcgctggggtcgtcatctccacctgggacgcttgggggcatcaacctgagttctcagtgaaagtcttatttaaaaagccttcagtgatttgtctagattcttccgttttctcctgcttgttttgagaacacacacacacacaccatgtgtgaaattcgtatttctttttctcatctccagactttttaaaaactttctattttaaaaataatgataggctgtacaggaagttgcaaaaatagcacagccagcccctgtacccttcaccccgcttccccctggaatagcgtcttacataactcaaataattctcaaagccggaagcggctgtgggcgccacacctgctccctcgttggcagagctccatttccagatttttcacattaagcttccctcttgcacacacccctgagtatgtgtacgtacacttctggagtcacacactgcacctgacccacactcacagagtcacatgcctacatccaagcacacgagttgctcacacacagtgacgtgcaccacatatgtacaggcagattcaaatacctacagaggccaggtacagtagctcatgcctgtaatcccagcatttggggaggccaaggtgggaggatcacttgagccaggagtttgaaaccagcctggacaacatggaaagaccccatctctttaaaaaaaaaaaaagaaagaaagaaagaaaagaaaaagaaagcaggtagagtgatggggctcacgcctataatctcagcactttgggaggctgaggtgggtggatcactggaggtcaggagttcgagaccagcctggataacatagtgagactccgtgtctacaaaaaataaagagttagctgggcgtggtgatgcgcacctatagtcctagctactcaggaggctgaggcgagaggatctcttaagcccgggaggttgaggctgcagtgagccgtgatcacgccactgcatccaacctgggtgatagagcgagaccctgtcttaaaaaaaaaaaaaaaaggtagagtgtggtgcttcacacctgtaatcctagcactttgggaggctgaggtgggtggatcactggaggccagaagtttgagaacagcctggccaacatagagaaaccctgtctttcctaaaaatacaaaaaaattagccaggcatggtggtgcatgcatgtggtcccagctacttgggaggctgaggcaggaggatcacttgaatccagcaggcagagactacagagagccgagatggcaccgctgcactccagcccgggtgtcagagccagaccctgtctcaaaaaaccccacaaaagccaaaaaacaaaagacaaaaaaaaaaaaagactgtagaaaaggacaggacacggtcacagcacagatacacacacacacgcgaccaattacatggtgcatggaaatgaaccctgttgtgcacacacagctctgaatacctttgttaaagtgcccacacacacatcacatccatgcagagacctacacgtggggttgcaatgcagattcaaacagctacacaaatatgcatgcacacagtcacactcatgcacgcacacacacacacgcgcgcaccaccccacgtccacactcacagtcatacatgcgcgtgcacacacacacacacacacacacacacacacacgctgccttgctggtaccgtaacctgtgctggaaaaatctgcacagagaattatgaatgtcatctgcgtccccgcccccaagccgtactagtcaccatggtttcagtaggatgctgtctgtattaggcagtctctctctctctctctgtctctctctctctctctgtctctctttctctgtttgtgcgtgtgtgaagaaaacagaaaacatttgctgccttggtgtaagtttgtccagctttggatctgacagacatagaatatactcaatgttctggaagggaagattaacgcagctgtagcaaggcctgcagtggtcacccgtacagagccctccccagctgtgtccttcttctagtgtaagagaaataagatgggggaagatgaggctcagcgctggtctcccaggctccaaagctggtgctggggccatgaggccacccggccccctcacccctgtttgtccctctgaagaaccctggacactgagttctttcttgggcccagcctctcac[144 bp omitted]gcctcctgagtagctgggactacaggtgcccaccaccacgcccaactaattttttgtatttctagtagagatggggtttcaccgtgttagccaggatggtctcggtctcctgaccttgtgatccacctgcctcggcctcccaaagtgctgaggttacaggggtgagccactgtgcccggcctgaccctccctttttttttttttttttttttgagacagggtcttgctgtgtcacccaggctggagtgcagtggcacgatcacagctcactgcaacctccgcctcctgccttcaagcaattcttctgcctcagcctccggaatagctgggattacaggagccaccacgcctggctaatttttgtaattttagtagagacagggttttgccatgttggccaggctggtctcaaattcctgatctcaggtgatctacccgctttggcctcccaaagtgttgggattgcaggcgtgaaccactgagtccagactcaacacataatttcacttgtctttttcgtattacatgagtacacattccctgtttaattttttttaattttaattttaattttttttgagacagagtctttctctgtctctgggagccacattgcccagcctcaataagtaggtttaaatttttttttttcattttcagaaacagggtctcactctgtcacccaggctggactgcagtgacatgatcatagcttactgcagcctcagactcctgggctcaagtgatcctcccgcctcagcctcccaaaatgctgtgattaccaggcatgagcccagcaataactatttgttgaatgaaaatgaattagaccgctgggcgaggtggctcacacctgtaatcccagcacgttgggaggccaaggtgggtagatcacctgaggtcaggagtttgagaccaccctggccaacatggtgaaaccctttctctactaaaaatataaaaattagctgggcgtgatggtatgtgtctgtaattccagctactcaggagtctgaggtgggagaattgcttgaacccggaaggcagagactgctgtgagctgagattgtaccactgtactctacctgggccacagaccaagactctgacaaaaaagaaagaaagaaagaaagtaaagaatgaaaagaagaaagaagaaagaaaaaaggaaagaaagaaagaaggaaggaaggaaggaagga[140 bp omitted]tgaagaaaccccatctctactaaaaatacagaatcagccgggcgtgatggcacatgcttgtaatcccagctactcgggaggctgaggcaggagaatcgcttgaacccagcagggggaggttgcagtgagctgagatcgtgccatgcactgcagcctgggccacagagcaagactctgtctcaaaaaaaaaaaaaagaattagaccactggacaaacccaaaccaaaagatcatctacaaaccctgtctcctgacaaacattcccggagagggcacagtctctacccaccttccagttgactacccctggtgcagacaccttgaaccaaactccctctgtttttcagcccacgaattggcatcacaggtgagctgggagactctgtaaggccatgacggacatggggattatcagcatccgtcctgatcaaccaggcctcatttccaggccccacacctgctcagggccggcagcagctgagcagagctgaaacttgagcccctatactcacagcttgcgacagacgcacccagacctgtgcagacacagctgatgaaccagaaacagtccctgggaagccccagcagccccagaggctggcggcatgtctggccacaatttgggaaatattacacttgtgggaccagagaccttga[132 bp omitted]gaaaccccatctctactaaaaatacaaaaactagtctggcatggtggcatgtgcctacttgggaggctgaggcaggagaatcgtttaaactcaggaggcagaggtttcagtgagctgtgatcccgccactgcactccggcctgggtgacagagtgagactttgtctcaaaaagaaaaaagaaagggccgggtgcggtggctcatgcctggaatcccagcactttgggaggccgaggtgggcggatcatgaggtcaggagatcgagaccatcctggctgacacggtgaaaccccatctctactaaaaatacaaaaaattagccaggcgtggtggcgggcgcctgtagtcccagctactggggaggctgaggca[137 bp omitted]tggtcccagcactttgggtggctgaggcaggtggatcacctgaggtcaggagttcaagatgcaggggaggtaagtccccaaattgggtcttagcaggggagggttttttactttgcccaggagagaattcagggcaagctggtggtgttagcaaccttttttttttaaaacggattctcattctgtcgcccaggcaggagtgcagtggcgtgatctcagctcacagcaacctccacttcccgggttcaagcaattctcctgcctcagcctgctgagtagctgggactacaggcgtgcgccactgcgcccggctaatttttttttgaaatggagttttgctcttgttgcccaggctggagtgcaatggttcgatcccggctcacagtaacctccacctcccgggttcaagcgattctcctgccttagcctcccaagtagctgggattacaggcatgtgccaccatgcctggctaattttgtattttcagtagagacaaggtttctccatgttggtcaggcaggtcttgaactcctgacctcaggtgatcctcccaccacagcctcctaaagtgctgggattataggcgtgagccatggcagctggcctaatttttgtatttttagtagagacaggttttcaccctgctggtcagactggtctcgaactcctgatttcaagtaatccactcaccttggccttccaaagtgctgggattacaggcgtgaaccgccgtgcctgaccgtggcgttagcaatcataattgcagcggccgtataaggagctgcagaagtcctgctccttgcagagtagggctaccccataggcagtgagctcagagcagcagcccagaggcagttctgcaggcgtattgatacccacttttaattatatgcaaattaaggagcagattatgctgacatttctagaagaaaggcagtaacttttgggttgctgggttgttgcaatggaaagggatggttacgtctgggtgttgccatggcaatggtaaactgatatggtacacagatggggaagtactttctgcctttgcctgtattagctagtcctcaatcaggtccgttgtctgggcccacctgtggagtcaagagccccgcctcttatttcaacagtctttaatgcttatggaagttgtgagaattcagtgggttgacaaatggtgagattggtgaatactgaac[138 bp omitted]cctcagcctcccgagtagctgggactacaggtgcccgccaccac[136 bp omitted]cttttaagtgtgttattattccatgaatccagttcatactttctcaatctcggcactaataacatttgggccagataactcttggttggtaggggtggggtcctgtacgctatcgggtgctgagcaggttctaactactccatgccagaggcatgcccggttctgggggtaaaaatgactccagacattgctcagcatcccctggggacagaatcacccccaggtgaggcctctactgatctaggttaagtgattttaaaaatgacaataattgacggaaaccacgatgaggagattagacactccatatccgtgtaactaaaaatcgagagatgtccataaatttcaagctgcaactatgtgtttttaaaaattgtttaggccaggcacggtggctcatgcttgtaatcccagcactctgggaggtcgaggcgggcggatcacctgaggtcaagaggttgagaccagcctggccaacatggtgagacccgccgtctctaataaaaatacaaaaattagccgagtgtggtggtgcgcgcctgtagtcccagatacttgggagactgaggcaggagaattgcttgaaccctgtaggcacaggttgaagtgagctgagatcgcaccactgcacttcagcctgggtgacagagtgagacgccatctcaaaaaaaaaaaaaaaaaattacaaaagatctcttcaaatgtcacacaggcacactgagggcaacacatgttcccagaccacaaaggaaaagagctgtaaagaacgtgatagcgacaggtggcgaagtgtgcatatggattatatattggataataacatcaagtcaacgtgaaatttcatgaattcattgtatcttcatcattatgtaagggaacagccttgttcttagaggtgcccagtcccttccgggcttattaacaataaacagttgtacatattaaaatgttcacaatgggtgaggtgaggaaagacagtacctgagaggtcatggtactcttcttgcatctttt[148 bp omitted]cccgtctttactaaaaaaaaaaaaaaaaaatacaaaaaattagccaggcatggtagcgggcacctgtagtcccacctacttgggaggctgaggcaggagaatggcatgaacctgggaggtggagcttgcagtgagccaagatcgcgccattgcactccagcctgggcgacagagagagactcctctcaaaaaaagaaaaaaaaa[133 bp omitted]acacggcaaaaccctgtatctactaaaaatgcaaaaatcagccaggcgttgtggctcaagcctgtaatcccagcactttgggaggtcgaggcgggcagattgcttgaggtcaggagtttgagaccagcctggccaatgcagtgaaaccctgtctctactaaaaatacaaaaaattactggggcgtggtggtgggcacctgtaatcccagctactcgggaaactgtggcaggagaatcgcttgaactgggg[137 bp omitted]atggatgaaccttgaggacatcatgttaagtgaaagaaaccagtatgaggagacaaacacataattccagttacatgagttccctagaaccggctaatttataaagacagaaagtaggttggaggttagcaggggctggggaaatggggagtttttgcataatgggtacagagtttctgtttaggaggctggaaagattctggagatgatgatggtgatggtggcacaacagtgaatgtacttaatgccactgagccgttcacctaaaaaggattcaggccaggtgccgtggtatgcgcctgtagtcccagctactcgggaagctgaggtgggaccactgcttgagcctgggagtttgaggctgcagggagctatgatcaagccactgcactccagcctgggggacagagtgagaccctgtctcggaaaaaaaaaaaagttaaaatggcaaatttcatgtgacacagtcatgtattaattgataatggaaatacatgggaggctgaggcaggagaatcgcttgaacctgggaggcggggattgcagtgagccgagatcgcgccactgcactccagcctgggtgacggagcgagacgctgtctcaaaaaaaaaaaaaaaaaaaggaaatgcattcagcaagatgtgtcattaggcaatttcgtcgttgcgtgaacatcatagagtgtgcccacgcacacctagatggcacagcctaccacacacctaggctgtatggtagagcctaatgctcccaggctacaaacctgcacagtatggggctgtactgaatcctgcaggcaactgtaacacgatggtaagtacttgtgtatctaaacatatctaagcatagaaaaggtgcaggaaaaatattgtataaacgattaaaaattggctgggtgcggtggctcatgcctgtgatcccagcactttgggaggctgaggtgggtggatcccctgagttcaggagtttgagaccagcctggccaacatggtgaaaccctgtctctactaaaaatacaaaaattagccaggaggggtggcgggcacctgtaatcccagctactcgggaggctgaggcaggaggattgcttgaacctgggaggtagagatcatagtaagccaagatggcaccactgcactcaagcctgggccagaacaagactccatctaaaaaaaaaatcttattgaacaaccatcataattgcagtctgtcattgactgaaatgttgttatataatgcttaacggtacatattttaccacaataaacacacgtagagtaataagatgtcatttccacgctcaggttgtaagacactgtaacttccatcttgttagccgaatgtattgccttctcagttttcaggcttcaataaagcaatccaccacgttgaagagacccctatgtgagtttgcaagtggctcttttccctttccaatcttttttcttttcttttaggtataggatcttgctatgttgccctggctgggatgcagcggctattcacaggtgcaatcatagtgcactacagcctcaaactcctagcctcaagcaatcctcatgcctcagcctccagagtagctgggcctacaggtacttaacacctcatctggcatcccccagtcagatatttggatgagacccctgccttggctaacaccttgatgaaaacctgtggaaggttctaaggcaggtacgacacagaaacagtgagataatgaatatgattattttaagccattaagatttgaggggctgggcaaggtggctcatgcctgtaatcacagcactttgggaggccgaaatgggtggatcacttgagcccaaaggtttgagaccagcctgagcaacatagcaaaaccccatttctacaaaaattttaaaaattagctgggcatggtggtgtgcccctttagtcccatctagtctggaggccgaggtgggaggatcactaagcccaggagacagaggttgcagtgggccctgatcctgccactgcactccagcctgggtgacagagggagaccctgtctcaacaacaacaaaaaagatttggggctatttgttacacagcaataaataactaatacacgtgtgtgtgtgtgttgtttgtttgtttggttttgagacaaagtcctgctctgtcacccaggctctggagtgcagtggcacgatctaggctcactgaatcctcccccccactgggtgcaagtaattcttctgcctcagcctcccaagtagctaggactacacgtgtgccacaccacgactggataatttttgtatttttaatagagagggggtttcaccatattggccaggctggtctcaaactcctgacctcgtgatccgcctgccttggcctcccaaggtgctggggttacagatgtgagccaccgcacctggtccactattttttttttatcattattattagaggaagtttcataaagagaatgaatatgtgggcttttgtagccaatcctagagggtgggagtccctccctgcctcctagcttgtacttgccccattgggagcctcagttttctcatctgtaaaaggcgaatgataacaatgcctgcttctggggcataagaagcatgagatgcaaataaagcgtttcgctcaggctctgcacgtagggagtggtcaggtacaggggccgtggtgatgccgctgatggctagggggacagggactgtctcctgtcttgtctggtgacatccccttctgaacagagacttggagcctgcaggggtttcagcaattgtttgttgatgctgcaagatctctgtgcccctgccgtgtttgtctgtctgtctgtcagcgtgccctaccctctgtgctcgctggcctggttcgtgatcctcgccgtgtcctgtccacccacttggatgtcctgtcatgtccgtggggggctcggagcgactgagctgtgggggccggagactgggagcgggagctgagggagggagggaggagggagggagggaggcagcgcttgcctggccctcatgatcccccctcctcgtctcttgccgaggaccctcagcgcagccacttctccaggcactcggcagagagaacgcgcgtaggcgttgccctggcaacgccgggatgcccagcaacaagtccgcggcgtgtatcacgtgctcggcgcggaccaatccgagggcccgccgggaagcaggtcagcctgggccaaagtccgcctcctccctcgcggcgagaggctcccagctaattaccgtaattgcggtgggagagctgccggatgcgcgggggctggggctgggggctgggcaggccctgaggagctgagcggggagggctggaaaacaggactctcctccaacagccctgccgctgcctccaaccccaccatcgaagcgttcattaggcgcctacagtgtgcacctgctgttggaaggggtgggtttggagtgtttccagtggtggtggggaaccctagcctccagcctgggtaaacctagatttgggggcgcggggaacagatttgactcttaagactcggggtctcatggaaactgtccaatcgccgttggctgtattgaaccaatccccccctcccccatcccgatgggtcacggtttcctcctgcacaaaaatacaaaaagtttaactcttgaagagggtgtattaaaagatttgcctctgggtggacagaattcacatcccgtctctgccatttgcggctgtgtgactctaggtgagtcccttaacctctctgagccctcgactcctcatcagttaaaagaacaaataggaccaggcacagtggctcactcctgtaatctcagcactttgggaggccgaggcaggcagatcacctgaggtcgggagttggagaccagcctggccaacatggtgaaaccccatctctactaaaagtacaaaaattacccgggcccggtgacaggcacctgtagtcccagctactcgggaggctgaggcaggagaattgcttgaacctgggaggtggaggttgcagtgagctaagatagcgcattgtgctccagcctaggtgacagagcaagactctgtctcatattattgagagaatgtgtgtgaagtgtgcagcaagtatttaataaacagcagctaatcatcaccatggtcccagctctcagttaggagctgtgagaccttccaagtgtcatttaatggcactgagccccaactgtttccatagatgaggtgaaggagtgggagaagtggcctcgtgtcagattccctgccactgcagtttgtttcctacacaatgttctctgggttgtttttctttctaattaataatagctcaaggccaggtacagtggctctcacctgtaatcccagcactttgggagacctggcggaggcaggaggatctcttgaggccaggagttcaacaccaccctgggtgacagactgagaccatgtctctaaaaaacaatagaaatttaaaaaaagaaagaaaattagctcaaagtgggggccttcatgtgaaggcatttaaatttctgattcctagactacctgatttttttttttttttttgagacggagttttgttcttgttgcctaggctggagtgcaatggtgagatcttggctcaatgcaacctctgcctcccgggttcaagcgattcc[132 bp omitted]tcggcctctccaagtgcagggattacaggcttgagccaccacgcctggcctagctgatctcttcttaactcctttccagttatttgctttgtttgttcttttgtcgacaagcattaattgagcacctagtgtgtaccaggctctactgtgggtctgagtcctcagcctcgctgtgctgaactcagggtccaactgagccggactgcagggcagcttcgaggagtaaatgagacccttcagtcattcagtgaatttcaggcattgggaaatacagtgccaatagttgtgactatcgcattgaccacaggaagtggcccaggacctcagtggacgggaggacacatctgatcatcgttcattttcaccagtgctgatttcctcctccaggtctttcctcccgctcgctgttccatctttcccggaagactttcctctgagcaggccctctgctcacctgctccgggaacagcaggagcaaagacacaaatggcagagcctctgaggggctcccctgggtgtacccccctccaccactgtggctgccaggaactgtcttcctatctgctcccctcttagaagggcagtcaccagacggcagttgcagagaaggactgtacttggaagttgtttttattgttgtagttgttgtttttgagacagggtcttgctctgttgcccaggctggagtgccgtggcacgataatagctcactgcagcctcaacctcctgagctcaagccatcctcctgcctcagcctccagggtagctcggaccacaggtgcatgccactatgcctggctaatttttgtattttttgtagagtcagggtcttgctatgttgcttaggctggtctcaaactccggcctcaagtgatcctccagtcttggcctcccagattactgagattacaggtgtgatccactgtgcctggcccagaattttgttaatatgcatatttcaggagcctctgcaagctaagaagggagaatacaacttccatgcaagggcctcccaggactcagggctggtgagcaaaccaggtctgcaggaacttggcttgactctgcagcccaaaaggcacattttggaggcttgggtctggtcccacttcagactcaggtaccaaccacagaatttggctgaaagtggggactctggtctcaaaaggcagctctctctgtttctctgctgtgtgagcctgggcaagagtctcaactctctgtgcttgcttctgcccctgggacatggtgctaataagcaccaagcttggaaagttaacgtgaggacgagatgaagagaagagccagcacctagtaggttttcaataaatggtagctggcattatcatttacacagattggggactgattggaaggaagccgtgacggccacagaaccaacagaaagctagaaaatcgcttttgagaacaggcagatgccaagagaagagccattgaggggagcagcaagatggcaggcagggaaatatcaagcctagccccagacagactccgtctttcagtaggactacgggctagcaatccaacctctgtcttcttcccttttccccatctttcaaacaggaacaaaacaacaggtcctggttccctggaggatgagggtgtgagttggaacagatacccttggagaggttccggaaggttccagaaggttctggaaggttctggaaggtccaaatctggacctcatcgtatcattgacaaatatctattggggctcaatattttcaggacacggtgcttcatgttagggctgccagaaagtatggcaagccaagacaagaaacatcaaagacggggataggaaagctggattctagtcctggctgggcctctgacgtgctgtttgagctctctgggcctcaaggaattgaaaagtaggggggttctataataggaaggccacccttcagagcccttctctgccccctgcttgctaggtgtccttggggaaaatgtctccacctctctgggactcagtttccacatcagaacagtgagattcagtcactgtgctgcaggacagctttgaggagtaaattagattatttagtcattcaatgaatttcaggcattgggaaatacagtgccaattaaaatggggcatgacctggctctctatggtctataaaacgcttagcacatagtgaatgacagacaatgagtaccaccattgggccatcatcatcacccgtaaagtgctcggcacaaaatagatgctcagtaaaccctagttagtaatactgcagcagtagttccaggacctacattgcaagattctctcctctcccactgtgtccaaagcattaacgtgccaggaagcaggaactgagacctttattagggattccctgggtggcctcaggtggggagggtgacctgcgtgtggtcctgttttcatgccctgcctcttctaggtaaacgcctctgctaatctccccttgcccaggctgcaggtcaggtttcggggccccaggcagatgttgtccagagtagccctgtttccttaatcctcagggctccagaaattgtccttagaagaaagaacaacagacccgctgaggtcaccatctgtgcagtcttgatttgtaaatgctcatgagggtggcaggaaagaggtctctatagtaacggctgaggaaggggctgcgtgtgtgtgtgtgtgtgtgtgtgtgtgtgtgtgtgtgtgtgtacgcgcacatacagggaggaggaatcacccaaggcccttattcctagacttttcttttctaccctgatgagctattaattaatactcattgctggcttgttattcccagagataattagctactgttcctaactggagtcgtggggccattttctaaatagattcgttcgcctctgcccacccacacctgtctatctcccgggacacaaggaaatgttacagaacacagagacccagagaggagaaaaactgaacaaaggggtctctctgggaagctcagattccaagtgaatagacaagagcagagcctgaatgagcaagggcccagtgcacagaaagttattataaaaatgccagctatagctgagagtggtggctcacgcctgtaatcccaacactttgggaggccaaggcaggaggatcacttgaggtcaggagttcgagacgagcctggccaacgtggtgaaaccccatctctactaaaatacaatcgctctggaaaagtttgacagtttcttatgaagttaaatatacacttcccatatgacccagccgtcaccctcctaggtgttaccctggagatgtgaaaatttatcgcccacatgaaagcctgcatgaaaatatttatagcagttttattcctaataatctccaaacacagaaggtgttccagaacctaatgtccttggactgatgaatagctaaacaggccatagttcatccacatgatggaatactacttaataataaaaaggaactaactccgggttcacacaacagcatgaatggctctccagtgtattctactgaggaaaggaagccaggccaggcgtggtggctcacacctgtaatcccagcaatttgggagaccgaggtgggtggatcgcttgaggtcaggagttcaacaccagcctggccaacatagtgaaaacccatctctactaaaaatacaagaattagctgggtgtggtggcggacacctgtaatcccagctactcgggaggctgaggcaggagaatcgcttgaatccgggaggcagaagtcgcagtgagtcgagatcatgccactgcactccagcatgggcaacagagtgagatttcatctctaaaataaaataaaataataaaaaataaaaataaaaagtagcaaacgtgcatgtgggcggagaatgtacacacttatatatgcatgtacttctggaagggcacaggaaatgaaatgaacaattgataagagattaaaccttggggttggcagactggggtccccaactcccacaccctctccctgtggtccttgggcaagccccttcccctctctagccatctataaaacatgcatatcagccaggcatgatagctcatgcctggaatttcagcactttgggaggccaaggtgggaggattgcttgagcccaggagttcaagaccaacctgggcaacatagggtgaccctgtttctacaaataatttttaaaattagctgggcatagcggtgcacacctacagaaggctgaagtaggaggattgcctgagccaggaggcagagactgcagtgagccatgattgcactactgcactccagcctgggtcacagactaagactctgtcttaaaaaaaaaaaggtctttcttcctttttttttttttttttttttttttttgagaaggagtcttgctctgttgcccaggctggagtgcagtggcacgatcttggctcactgcaacctccttctcccgggttcaagtgattctcctgcccgagcctcccaagtagctgggattacaggcacccgccactatgcccagctaattttttgtatttttagtagagacgaggtttcaccatgttgaccaggctggtctcgacctcctgacctcgtgatttgcccgctttggcctcccaaagtgctgggattacaggcatgagccactgtgcccagtcaaaaggcctgctttcctttctctctctctctctctctctctctctctctctctctctctctctctctctctgtctattttgagatggagttttgctcttgttgcccaggctggagtacaatggtgcaatcttggctcattgcaacttcaaactcctgggttcaagcgattctcctgcctcagcctcctgagtagttgggattacaggcatgcaccaccatgcccagctaatttttgtatttttagtagagatggggtttcaacatattgtccagtctggtctcaaactcctgacctcaggtgatccacttgccttggcctcccagagtgctgggattacaggcatccagccaaaaagaactttctttctttttctttctttctttccttctttctttttctttctttctttctttctttctttctttctttctttctttctttctttctttcttctttctttcttctttctttctttttctttcttttttctctctttctctttctccttccttcctttctttgttcttcttcttctttttttttaacagagttttgctcttattgcctaggctggagtgcagtggcacaatcttggctcactgcaacccccacctcctgggttcaagcgattatcttgcctcagcctcccaagtagctgggattagaggcacgtgccaccatgccggctaattttgtatttttagtagagtcagggtttctccatgttggt[132 bp omitted]ggtctcgctctgtcacccaggctggagtgcagtggcatgatcttggcttactgcaacccctgcctcccgggttcaagcgattctcctgcctcagcctctgtagtagctgggactacaggcacccgccaccgcactcggctaatttttgtatttttagtagagac[131 bp omitted]gccctgaggccttcagatcactcagcaggtagaatgtctggcactgaccctggcacagagtaaaagcttagggaaggggagagagaaagggtggcaggtcttcctgtgcaacctgaggaacttcacttttgtcctggcctgaatgatcaggtcctgtacagctgtccctgatttatatcctaactgtcccttctatgcttgctcaccccccagggcctgttctttcccccacccccaccagggcccttacactgactgttccttcaacccaatgcccataccaacatgtgagcagagttttcatgtctttaccctccctaaaggcaaggttggttgctgaattcatgtatgtatctccagtgcctagtacaacaagtttgttgagcaaataaatgggtggaatagatcaggaaagaataacagctgcattattagaaaacttaccgtaaacagacatgattgctagtgccatgccaagccatattgggacctcaggcaaaaggaaaagtcagaaaggctggttctgcctttatttacatttttgatattttgttcattgtggattttggcatacattttgatttcttaaaacattgcatcgatttttttttgagacagggtcttgctctgtcacctaggctggagtgcagtggtgcaatcataactcactgcagcttcgacctcctggcctcaagtgatcctctcacctcagcctcccaagtagctgagaccacaggtgccattctctctctctctctctctctctctctctgtttctctctttctctctccctctctccctctttctctctcagaaacggggtctcactatgttgcccaggctcatcttgaaatcctggcctcaagtgatcctcccaccttggcctcccaaagtgctcagattacaagcatgagccattgcacctggcctgaaatattatttaccttgattattgagttttttggtgcccctttaagttttgcacctgaggctggtgcctcacccaactcacattagcccctgccctgattatttctaacatgcaatccacaccatatcattagttcctcagcaaatactctactattatcactacttcacagttgcaaaaactgaggcacaactgtgcccaatgtcccaaaggaaggagaagaaaaatctgaacttgaaccccagtttcttcgttttttggttcagagcctgcccagtatagcactacaataagctgaattttataaattgggttttgagttaaggaatcaaaagcttcaggcttaagtcccacctctgccccagagtcttctgagccctccattttcacagacgtcagttgccctaggtggaactggactttaatattctccacatcccttattttttcccaaaacagtttaccagctttttctttcctgaaccaggagcaatagcaaaaattgggaatgggaagaaacaggtaccagccaggacacctgaacgaacttggagctcaggaacccaggaggggattggagagagtggggagactccatggtccacaatgaatgctccttccccatccgaaaaaatcccctagcccagtttttgggcagatgccagacttttattctgaagcgtgggccacaacctatgaggtaatctttggagcttcattctgaggcggaatcccattggccagttggggaagcccctcccaggattcctggcgctccgccttccctgaagcctataaaagcgcaggtccccgcctcggcagccacgggacacctgcatctgccaacaagactggaagcaggtgaggcacacagagggggaggcccgcagctgcgtgggaggaggggtggtctgagggacgtgggatgccgggaatgaggctggtttgcaggttggcgcatggacattttcccagaaagggacagagacggcgaagtttgacggtctggaaagcagagaccagcagggctgactgcttgggaggtaagttctggggacatggtacagggtgaggagcaggtatcagtgctagttgcgacccctctgtgtctcccccccgccaccccattgccattctgaagctccccaggaagaagctaggaggggaaataaattgagtgggggtggggtttcccaagaatcggaggaaccgagaacgaagaggggtgggggaacggggaaagagagaggaaaatcaagttttcttcagcacgagggacagctctccaccgaccgaaggaggagaatgctatttatttcagcaccaaatatccggacagcgcctctcgggaggtccgagaagagaaccgcgatctgtttcagcaccggggctcaggacagttcccagcgggctccgtttcgtctccagaaccctggacagctcctccaggtaacgggagagccctttgaccctgattttgcagggggaggacgagagagggtggtctgaggtgcctggcatttctggagacctgcacctcatgtaatggatttttaaacaaagtattttccagataagcacacacagaagtctgcaattttctttttttttcgagacggagtcttgctctgtcgcccaggctggagtgcagtggcacgatctcggctcactgcaacctctgcctcctgggttcaagggattctcctgcctcagcctcccgagtatctgggattacaggcacatgccaccactcccggctaatttttgtattcttagtagagacggggtttcaccatgttggccaggctggtctcaaactcttgacctcttcatccgtccacctcagcctcccaaagtgctaggattacaggcgtgagtcactgcgcctggcccaagtccggaattttcaacaggtaagatacctcactggggtaacagctgcctgctaagatgacattatggtgtctcttccagacttcggtgagaaaccttgtgccaagcattttacatacatcatatcatgccatcttcaaccctaggacatgggtgttactgtgcccatgtgacatttggggaacccaaggccctgagaaaggcagaaaaataacccacgcagggactctcagcccacaagtgaagctgtaagtcaaccccaccagtccaactccaaatcccatgtctctgacgtgcctgggtgggaggtgggcccttggagatcagaccctgcttctctccaggagaaccgggaatggaaaacagggaggcagcacagaggcaggaaactcaggtgtcatagcttggctcaggtgagaaggaggagctgggcaggggtctcagacatggggcagagggtggtgaagaagattagagtggctgtggtctagtgctgtgtggaagactagtgattttgttgttctgatgtactacgacaacaagtcacagccggcctcatagcgcagactcccttcgaccttcgccttcaatgggctggccagtgggggagaaccggggaggtcggggaagaatcgcttccactcggagtgggggggctggctcactccaggcgatacaggcacaggcaaaggagggaagcaaacaaggacatacatcctgtgctcatacagccatgcaccatgtatggggtttgtcacatcactcgtacgcccccacaagcctggagatagaacatacctgactctaaacccaagacctctaaccaccttatggcgctttcctgggagacccaatgagggaatgacatttaaagccctccctagaccagagttctcagggtacttttctattaaaaaaaaaattattatttttttggccgggtggctcacgcctgtcatcccagcactttgggaggccaaggcaggtggaccacttgaggccaggagttcaagaccagcctggacaacatggtgaaactccatttctcctaaaaatacaaaaattagctgggcgttgtggcacacacctgtagtcccagctactcgggaggctgaggcatgggaatcccttgaacccaggaggcagaggctgcatgacccaagattgcaccactgcactccagcctgggcaacagagagagattctgtctcaaaaaacattttttttttcttttttgtaaagacatggtctcctgcctcagcctctcaaagtgccaagattacaggtgtgagccaccgaacccagcctaaggatacttttcaataaaagttccagaagtgggctgggtgtgggagctcatacctgtaatcctaacattttgggaggatgagatgggaggattgcttgagtacaggagtttgagaccagcctgggcaatatagtgagaccccgtgagttgacacatgcctgtagtcccaactacttaggaggtgggaggaacacttgagcctgggagatcaaggctgcagtgagccatgactgcaccactgcactccagactgggcaacagaacaacaccctgtttcaaaaaaaaagtttcagaaaagattcctttcctgtctgctacccatcagtgtcatgggccaatcataggacaagtgtgaacttgtgcccagtggtgacttatgacatcataaaggctcaccacctttgccagacatggtggctcacacttgtaatcccagcactttgggaggccaaggtgggaggatagcttgagctcaggagttcgagaccagcctgggcaacatagcaagacctcatctcagtaaaaaataataaataaataaataaatatataagactcactcccaattctctgcaacaccctaatcaagtgaaaaactgcacatggttacctgttctccagcctcagggcttttgcctctgctgttcctgcagcttggaatgcactccctccacctccaaccagagctccccacaactgaccctgccttcttctgcaagctccatttcatcaagggaaacgatccttattgcctcaccatttcccacgtgaagtctgtattgacattctcatagacctgggatattgtgtctgcagcacatagtccaattattttcatgttatctactgacaggtctatttgtctccctgttacactgtgagctccgtgagggcagaaacaatgttagtattttcactgctgtgtccccagcgcctggtccggggcccggcacacagcaggcatataataagcatgtgttgaatcaataaaggcatcaaagaataaaccaatacatcaatcaataaatgaatgaatggcctcagcacacacaggaagatccttcttctaggtctcccccagagagatactggagggcaatggttgctggaggtgtttattggggaagcataattgaatttgtggacacttaagggccggccagccaactcacagccccaagagagagagccaggctcatttaattagcaattacaaggcactgattcctcattagctctggcaaccctcgtctccctcctcagccccagacaaatgaaatctttctctctctcccaggagtactgcctcagtgggtccattaacaagcagagaaaatgagattagaagacacctaaatgccagaggcactttatgaatgggctgagcagagggaggttcaatgtctgggttaggtctaattgtgggaggtttcctggtctatttagaattgccccctgggaatgcaaggtctttcagaaaggaaaaggcacacagatattgccttctggggtcctcaatggaggaggacattctgctatgggtgtctcccagtcaccccaaattaatcatttcaaagtgaacactcaatctgcccagcccctagcttcctcccctgacatgcccatgaatatgacagtccctctacatgcccaagatcctcccctcctcatccactccccatgatccccaagatgagtcactgtgctcaaatccatcctctctcctccagccctctgcctccatgacctccctccagccctctgcctccatgacctccgcctccctgcatgtccggatctcctcactgtctcccctctgagcatacacacacatacagcctgttcattctctacatgcagcgaggggactttccagaacacacatctgaccaagttccactcctgcctgtcacccttccaagagccccactgactgcagaataacgttcaaatatccggttgggcgtggtggctcatgcctgcagtcccagcactttgggaggccaaggtgggtggatcacttgcacaggaccacaggcgtgtgccaccacacccagctaatttttatatttttggtagagacggagtttcaccatgttggccaggctgacctcaagtgatccacccgcctcaacctcccaaagtgctgggattacaggcatgagtcactgcaccggtctaattttttcagagtctcactcttgcccaggctggagtgcagtagcatgatctcggttcactgcaacctctgcctcctggtttcaagcgattctcttggctcagcctcctgagcagctgggattacaggcacgtgccaccacacttagctaatttttgtatttttagtagagatgggggtctcaccatgctggcacagttggtcttgaactcctgacctcaagtgatccacccacctcggcttcccaaagtgctgggattacagacgtgagccaccgcgcccggccagcctttattgattctttttaaagccacactaaccttttattttcccccaaagacccctgggagccctcagtttttcctggcagtttcatctttgtacccctgacctccccacacacacgcctagctcagtgctggcatccaatattcactttgggtataaatgcttgtgcctgagcctatcaccttcatcacacagaaaatcctggaggccacacacccctgtaaagacgagccattacccacagaggtccaaccaacttaccaccctctcccagccacccccaaggacccagcttgcagctgcctgctcaatggctttagaaactaaaaaaggtgaatgagtttccatcactgccctcctgggctttgccgttatggctggttaacttgacagaagaacacattatacttcattttttgctgttgtcttgttggaaaaaaaagtgacagctgggtgcagtggtgcacactgtagtcacagctactcaggagaattgcttgagcacaggaattggaggctacactgagcaatgatcgcctcactgcactccagcctgaacgacagagcaagaccctcttaaaaaatacgtgagagagggtgcgtatgatggctcatgcctgtaatcccagcagtttgggaggccaagacaggtggattgcttgaactcaggagttcaggactaacctcgccaacatggtgaaatcctgtctctaccaaaaatacaaaaaaaaaaaaaaaaatgtcgaacatggtgtcacgagcctgtagtcccagcttctcagaaggctgaggtgagaggattgcctgagcttgggaggcggaggttgcagtgagctgagatcgcaccactgcactccagcctgggtgacagagcgagaccccatctcaaacaaaacaaaacaaaacaaaacaaaaaaaacgggcatgatggctcacacctgtaatcccagaacactttgggaggccaaggcaggcagatcactaggtcaggagatcgagaccatcctggctaacatggtgaaaccccatctctactaaaaatacaaaaaaaattagctggccatggtggcgtgagcctgtagtcccagctactcgggaggctgaagcaggagaattgcttgaacccgggaggcggaggttgcagtgagctgagatcgtgccactgcactccagcctgggtgatagagcgagactctgtctcaggaaaaaaaaaaaaaagtgtgagagagacccccttctcccctggccatgagcaattaaattatgattttaatcacccagagttaagtgtcagaatccacaggttagccaggtgcaatgtctcatgtcctgtcatcccagctacccgggaggctgaggtgggaggatggcttgaggccaggagtttcataccagtttgagtcttactatgttgtgggcaacatagtaagactcccctctcttaaaaaagaaagaggaggctgggcgcaatggctcatgcctgtaatcccagcactttgggaggccaagacgggtggatcacctgaagtcaggagtttgagaccagcctggccaacacagtgaaacctgaatctattaaaaatacaaaaattagccgagcgtggtggcacacgcctgtaatcccagctacttgagaggctgagctgggaggatttctttaaccaggaaggcagaggttgcaatgagccaagattgtgccactgcaccctggcctgagcaacagtgagtccgtttcaaaaaaaaaaaaaacaaaagcagtcactcctcattcttcttcccacactccagcccctggcaaccatttatctgatttctatctctctggattggcctgttctggacatgccatagaaatgggatcacacactgtgtggctttttgtgtctggcttctcccacctgagcctgacgtcctcaaggttcttgtagcctgtgtcagagcctcattccttttcatggctgagtcatattccattgcatggatataccacattttccttatccagacgctgttttgatggctttagacacatgatctcctgcgaggttggtggtcttattgcaccctattttgcaggagaggaaactgaggcccagggaggtcaagcaagttgctcgaggttgcacagctgctggtggcatagccaggacttcaatccaggcagtatcatctagggtctgcaagttgaacccctaccttctacccctctaacagtttagtattcagagactatgtagcaattattatcattttttaaaaaatggagtctcactctgtggcccaggttggagtgcagtggtgtaatctcagcccactgcaacttctgcctcctgggttcaagtgattatcctgcctc[134 bp omitted]cggcctcccaaggttctgggattatgggcgtgagccaccgtgcccagcccaatccaggcagtttgatccagtctgcaagttgaacccctaccatccacccctctaacagtttggtattcagagacaatgtggcaattgtaatgtatctctatcattttcccagggaaggatgccaagacacagacaggagtttgtggcggtcacccagtgaatcatccccagctagggctggaactgaagcctcaggcttggggaggggtcagttcagaaaccttgagggtcttctctgacgcctgcttggctcccttgtgtatgttttggagaatttttttgtagggaggcaagtgagggaggagggcagaacttaaatgctgcaacattcaagggctcaaacggtggttgcctcccactagggagggcagggggccgccagagagagccttgattatgtcctgcaccttaatgggtccttcctaagagagtggctttggtttccatgacaacaagccggcagcatcagagcaagatagtggagtctcctcccccgacccacatctggttctggaatctctacccctctatcccagtcattccaaatcgcaggaatccagctgtggctcagcccaagaccagagggggcagccacgcagtggacagcgctccttctctgtggcctagcaggcaggaggacccctggccctgccccacgctggtaaggaagagatgaatggacagaaatagcgtatgccgggcctggcacagtgggttacgcctgtgatcccgcactttggaaggccgag[132 bp omitted]tgaggcaggagaatcgcttgaacccaggaggcagaggttgcagtgagctgagatcgtgctactgtactcaagcctgggcaataagagcaaaactccgtcttgaaaaaaaaaaaaaaaaagctacagccaggaagggagcagtggctcatgcctgtaatcccagcactttgggaagccaaggagggatgattgcttgaggccaggagttcaagatcagcctgggcgacatggcaagaccatgcctcaccaataagtaaataaataaaaaattagttgggtgtggtggcacgtgcctattgtcccagctacttgggaggctgaggaaggaggactgtttgagcccaggaggaggaggctgcagtgagccatgattgtgccactgcactccagcctgggcgacagaacaagcccctgtctcaaaataacagcaagaaaacaaacaaaacaaaacaagacaaaaaaactctacagctaacagtacacttaatggtacaagactgaatgctttccccctagaatgggactaagacagagacgtccagctctgtagcccaggctggagtgcaggggtgtgatctcagcttactgcaacctccacctcctgggttcaagcaattattgtgccccagcctcccatgtagctggaattacaggtgtgcaccaccacgcctggctaattttttgggggtaattttagtagagacaaggtttcaacatgttggtcaggctggtctcaaactcctggcctcaagtgatctgcccacctcagtttcccgaagtgctaggattacagatgtgagctaccatgcccagccgactctcatcattccttccttccttccttccttccttccttccttctttcctttcttccttccttctttccttctttccctttctttctttctttctctttctcttccttccttctttctctcttccttctttctttctctctttccttccttccttctttctttctttcttttctttctttcttccttccttccttccttcctttcttccttccttcttttttcttttctttttttttgacaaaatctcactctgtcgcccagactggagtgcagtggcaccatctcggctcactgaaacctccgcctcccggattcaagtgattctcatgcctcagcctccctagtagctgggatcacaggtgcccaccaccatgcctggctaatttttgtattttggtagagatggggttttaccatgttggccaagctagtctcaaactcctgacctcaggtgatccacctgcctcggcctcccaaagtgctgggattataggcgtgagcgaccacatccagctgccacttctattcaatattgtattggaggttctagccagtgcataagaaaaaaaaaaaggcatccacattgcaaagaagtaaaactgtgtttattcacgggtgccatggttgtctatgtagaaaatattacagaatctacaaaagattgcaggctccaagaacaatataaaacattaattatatttctatatactagtaacaatctttcagaaattgaaattaggccaggcatggtggctcatgcctgtaatctcagcactttgggaggccaaggcaggcagatcacaaggtcaggagatcaagcccatcctggctaacacggtgaaaccctgtctctactaaaaatacaaaaaattagccaagtgtggtggcgggcgcctgtagtcccagctactcaggaggctgagggaggagaatggcttgaaccggggaagcagaggttgcagtgagctgagatggtgccactgcactccagcctgggtgacaggcaagacttcgtttcaaaaaaaaaaaaagaaaaaagaaagaaaattacagaaaattgtagacataaaagtttctcttttacttgttatgaggaagcagacatcctgggcaacatagtgagaccccgtctctacaaaaaataaacaattagccaggcatggtgatgcacctgtaatcccagctacttaggaggctgaggtagaaggaaagattgcttggccctgggaggtcaaggctgcagtgatctatgattgtaccactgcactccatccagcctgggcaacagagtgagatcttgtctcaaaaataaataaataaataaataaataaataagagagagaaaaagcaggtatgcctgctactccataacatttctgttagaaggctagatgagggttgtctcttaaggtccttaatgaaaaagaaaaaagacaggttcttttttttttttttttg[135 bp omitted]cacgcctggttaattttttgtatttttagtagagatggggtt[133 bp omitted]ctggtctgtaactcctgggctcaagtgatcctcccatcttgtccaccaaaattgctgggatttcaggtgtgagctactgtgacctgcaagggacctcatctttgatggagaatttccctaaaatgctccttttcttaaatagggtctcactctgtagcttgggctggagtcagtggcatgatcatggctcactgcagccttgacttcctgggctcaagagatcctgctgcctcagcctcccaagtagctaactataggcacacaccaccatgccaagctaatttttttattttttgtagaaatgaagtatcactgtgttgcccaggctggtctcaaactcctaggctccagtgatccttctgccttggcctcccaaagtgttgggattacaggcatgagccaccacccccagccaaaatgctgtctgatgagcaagggatgtcaatacaatacggaatgtaccatacctgccaggttgtccatcctctgcatttttggtgctgtctcttccttccac[224 bp omitted]gaggcaagagaatggcgtgaacctgggaggtggagcttgcagttagccaagatcacgccactgcactccagcctgagcgacagagcaagactttgtctcaaaaacaacaacatcaacaaaaaaaaaaaaaatccacaaacatctaactctgttttcttgtgaagatccaattctctccccttgaaagtgggctagacttggcaaatacgatgtggcagaagtgacactatgacttctgaggctgcgtgataagaggtgatacgatacagcttatgcctggttctctctctggatgcttgctcctgggacccagcagccatcttgtgaggaagctcaagctacatggaggtgttcctgccggcagtcccagttgaggtccttcaagatgactccaaccccagcctccttctgacttgaaccacatacgaactgcccccagtgagaactgtctagcagagtccactctcagaaccatgacaagtaataataataggttgttgtttatgtcagtaaccttgaggtcgtttgttaagtcaatttaggtatctagagcaatctggaccatttgtttcttccaaagttctacctaaaaaaaaatccctgtccaggccagacatggtggctcacgcctgtaatgccagcactttaggaggctgaggtgggcggatcataaggtcaggagattgagaccatcctggctaacgcggtgaaaccccatctctactaaaaatacaaaaaattacctgggcgtgatggcgggcgcctgtagtcccagctactcaggaggctgaggcaggagaatggcgtgaacctgggaggcggagattgcagtgagccaagattgagccactgcactccaacctgggtgacagagcaaggctctgtctcaaaaaaaaaaaaaaatccctgtccatacttgaagacctagcctcgcacatgaagtatctcccaggttcctccttccctccccagccagatacaatccattcattctcaggctcctgcatccccaaccacacagtctaacttgagttattctcctcccatcagattctgggctcttgagaacaacatctgcttgtttactgctatataaccaggatccagcacacagcccagcacatagcaggtgctaagaatataaataaatgtggctgaatgtttaaatgaatgaagaaatgaaacaaagatacatactaatgccttcaggctgtgctacattatataaatctatctagtcccttcagggagtgggagacacactgagactgtttcttagaaactaaaccatggcatattttcccaatgaacagacaattccccggagaggaaacagacatcgtaaacaaactcttggggaactgtgtgatttggttagtaattatagacaggcaaattaaagctaccagctagcacgtggcacaatcccagttactattactgcaccac[141 bp omitted]tgaaacaccgtctctacacaaaaatacaaaaattagctggacatggtggcacaggcctgtagtcccaggtacttggaaggctgaggtgggaggattgcttgaacccaggaggcagaggttgcactgagctgagatcatgccactgcactccagcctggacaacagagacagaccctttttttttttttttaatcattttcttatatcttatggattctgtaggtcaggagcttggggcagggctccactgggaaggtagccatttgcccaagccaaggagagaggcctcaagataaatcaatctttcccatatctttcttgtttttaagtcagggtcttgctctgtcacccaggctggagtgcagtggtgcgatcatagctcactgcagcctccatctcctggggtcaagatcctcccacctcagcgtctcaaggagctgggaccacaggtgtacatcactgtacctggctaactttttaaattttttcatagagacggggtctcgctgcattgcccacactagtcttgacctcctggattcaagcaatccctcatgtcagcctctcaagtagctgggactacaggcgtgccctaccatactcagctcattctgcccatatcttgatcttgaacttctaggctccagaaatgtggaaaaataactttctgttgtttaagccactcaacctgtgacatttagctatgacagtccaagcagactaatacacttactcctcttctcgtctctttccttttcttttcttttcttttttgagacggagtctcgctctgtcacccaggctgaagtgcagtggcatgatctcggctcactgcaacctctgcctcccaggttcaagcaattctcctgcctcagcctcctgagtagctggaactacaggcgtgcaccaccacacccagctaatttttgtattttgagtagagacggggtttcactgtgttggccaggatggtcttgatctcttgatcttgtgatctgcccgcctcagcctcccaaagtgctgggattacaggcatgagccaccgagcccagacttgtttgttttttttttttttgagatggagtctcattctgttgcccaggctggagtgcagtggcaagatctcggctcactgcaacctccacctcccaggttcaaatgattctcctgcctcagcctcctgagtacctggaattacaggcatgtgccaccatgcacagcttatttttgtatttttagtagagatggggtttcaccatgttggccaggctggtctcgaactcctgacctcaggtgatctgcccgcctcagcctcccaaagtgctgggattacaggggcgagctaccgcacccagccgagaccagtgttctaagtgaagtaactagtaatgaaaaaccaaatactgtgtattctcacataagtgggagctaagctatgggtttgcaaaggcatacagagtgaaataataggtgggacacagtgactcacacctggaatcccagcactttgggaggagaaggagggaggaccatttgagctcaggagtttgagaccggcctgggcagtatagcaagaccccacaagcatctaaaaaaaattagctgggtgttgtggtacatgcctctagacccagctactcaggaggctcaggcgggagggtcacttgagctcaggagttcaagcctgcagtgagctatgattgcaccactgcactgcagcctggacaacagagcaagaccttatctcaaaaaataaaaatttaaattaaaaaaatggtataatggacagtggagactcagaagcggggagggagtggagagtgagggataaaaagctacatactggggccagacgctgtggttcacacttgtaatcccagcactttgggaggccgaggcaggtggatcacctgaggtcaggagtttgagaccagcctggccaacatggtgaaatcctgtctctactaaaaatacaaaaattagccaggcatggtggcaggcgcctgtaatcccagctacttgggaggctgaggcaggagaatcacttgaccccagcagctgggggttgcagtgagccgagatcttgccacggccctccagcctgggcaacagagcaagactctgtcttaagaaaaaaaaaaaagaaagaaaagaaaagaaaagaaaagaaaaaagcaaaacgagaaaactacgcattgggtacaatgtactctacctgagtgacggctgcgctaaaatcccaggcttcaccactaccaatcatccatgtaaccaaaaacaacttgtaccccaaaagctattgaaattaaaaaaatttttttttgtttttttgttttgagacggagtctcgctccgttgcccaggctggagtgcagtggcacagtctcggctcactgcaagctccgcctcccgggttcatgacattctcctgcctcagcctccggagcagccgggactacaggcgcccgccaccgcg[138 bp omitted]cgcagccttaaatgtttttttaagggtccgttttgttttattttgctccctggtctagctcagctccggaatcggtgcagacacgcaatatcctctcagtagatatttatggaataaataaatctgtctcatctttggcattgctatgatggggtctattttgtctttttctctatttatccccatgtttaaaatatttttttattagaaaaaaaaacggaagtcaccttaggatgaaagcgcctcccctcccaaccccccagtggggtttggcatgtctctcgctgtccccatcacctccctggcccgtgcaggtggcctggccgtggttctgcacgggccgccgcgtttaggcggcactgcagctaatgacaccccgcagcgtgtgcctggctggccgcccgagatgtgcctgcgcatggcatggggacgtttgcaagcctggatcctggcgcgggggcaggtagcgggagaacaggcacgcagatggcagaggggctggggcggggacgctcgcctggcgtgggccacagtcacgacccaatcgtagcccccactgtgtctcttcatagttgcatccttggaaaccggcggggctgcaggaaaaaaattaaaaatcagatgaaagaaaataaagcagtggagacctccagaaggtgcccgccccacagaatagtagtcagagtggtgctgtggttacaatgtgcttcctggggtgatgactttattcattccacagatatttattattattattattattattattattattgttattatttgaaatggagttttgctcctgttgcccagactggagtgcaatggcgcgatctcggcccaccacaacctctccctcccgggttcaagcgattcttgtgcctcagcctcccgagtagctgggattacaggcatgcgctgtcacgcctggttaatttttgtatttttagtagagacgaggtttctccatgttggtcaggctggtctcgaactcctgacctcaggtgatccgcccatttcagcctcccaaattgctgggattacagacgtgagccaccgcgcccagcttccacggatatttattgagcacctactctgttctagaaacaggaatgcagcagtgaacacgacagagaagagtccctgaacaaacattctaaatttgttaattatacagcagggtaggttggaaagtgatgtatgctacggggggaaaaataggctgaaaggatcgtcgttccacctcggcctcccaaaatagtgggattataggtgtgagccacagtgctcagtcttaattttcaatattggccatgattaacaactggtaggaaaaaaaaatcctgaaaatataacgatcagctcttgtgagtcagtatacaccaacatctgcacactctggaggggtaaattctgttttgtttgtttgttttgttttgttttgttttgttgagacggagtctctctgtcgcccaggctggagttcagtggcatgatcttggctcactgcaacttcccagggagttggaaggagggaggaggttggagggaggaggttagagggaggaggttggagggagagaggaggttggagggaggaggttggagggaggaggttggagggagggagtaggttggagggagggaggaggttggagggagggaggaggttggagggaggaggttggagggaggaggttggagggagggaggaggttggagggagggacgaggttggagggagggaggaggttggagggaggaggttggagggagggaggagattggaggcaggaggttggagggaggagcttggagggagggaggaggttggagggaggaggttggaggcaggaggtttgctgatttttagcatttgcccatttcctgtggtgtaaatattcaagccaagaatgatttccagctaccaccaaggagccatagaacagggtatgggggctgggcgcggtggctcacacctgtaatcccagcacttcgggaggctgaggcgggtggatcacaaggtcaagagataaagaccatcctggccaacatgatgaaatcccacgtctactaaaaatacaaaaattaactgggcgtggtggtgtgcgcctgtagtcccagttacttgagaggctgaggcaggagaatcatttgaacccgggaggcggaggttgcagtgagccgagatcacatccccgcactccagcctggtaacacagcaagaccccgtctcaaagaacaaacaaataaaaaagaacaggatagtcggaaggaacgtgcagggggaccccagcacacagtatcccggtaccactgggcaggtgcagtggacttgaataacccaggaaacatagaacatagtgggacatagtaacaaaaatagtgaatttgtgagcatttgttatttgttatctttgtttttgttgt[139 bp omitted]cctcagcctcccgagtagctgggaatgcaggcgcccgccaccatgcccagctaatttttctatttttagtagagacgaggtttcaccatgttggcaaggtgggtcttgaactcctgacctcaggttatctgcctgcctcgggctcccaaagtgctgggattgcaggattgagccaccacacttggcctaaaaaacactttttttattttttatttttatttattattattatttttgagacagagtctcgctctgtcacccaggctggtgtgcagtggcacgatctcagctcaccgcaacctctgtctcccaggttcaagcaattctcctgcctcagcctcctgagtagttgggattacaggcgcctaccaccacgcctggctaatttttatagttttagtagagactgcatttcaccgtgttggccaggctggcctcaaactcctgacctcaggggatcctcctgcctcagcctcccaaagtgctgggattacagacgtgagccatcgcacctggccacaaagcacttttagacatgttttctctctcacgctcctatgttctcattttacagatgagaaagctatgttcagggagcttgggccactgtccaaagccatgcagctgtttggccgtggacttggttgttgaatccaggaattcagcttttagaattaacctcttgtctgtgttgagaggcaaatggttcgtaaagtattttcactcaaaacgcttagcctccctacggtgccaaatactataacaggcaaaaagagtgtcccgggggttgaccaaggtccatctggctggagcttctcatgcccctaaatggtcttatggccagtcccaggtgcactgtggaagtctcaaaagtagacatttaacatgcaactttaagctgctgtcctgttattggaccacagtccctctaattttttaaaataaatcctgtaattgcttcgtggaaagaacaattatattgcaag[142 bp omitted]tgaaaccccatttctactaaaaacacaaaaattagctgggtgtagtggcgcgcgcttgtagtcccagctacctgggaagctgaggcaggagaatcacttgaacctgggacgtggaggttgcagcgagacaagatcacaccactgaactccggcccaggcgacaagagtgaaactccatctcccccccgccaaaaaaaaaaaaaaaaaacttcagggtatgtgtgtgtatatttcaaatggttgaactgttcattaaaaacatttcaaatatgccatgaaatcctatttggaggcatttcttcatgttgtaccacacatgagaaagcatcaaaaaacaattggtggccaggtgaggtggctcacgcctgtcatcccagcactttgggaggccgaggcgggcggatcatgaggtcaggagttcgagaccagcctgaccaacatggagaaaccccgtctctactaaaaatacaacattagcctggcatggtagcacatgcctgtaatcccagctacttgggaggctgaggcaggagaattgcttgaacccgggaggtggaggttgtggtgagccaagatcgtaccattgcattccagcctggacaatgagagtgaaactccgtctcaaaaaaaaaaaaaaagaaaagaaaaaaagaaaaagaaaacaacaacaacaaaaaaagaatacttacactcgtaggcattacccaagagaaatgaaaacatatttccacacaaagacctgtacgcagaagtttatagcagctttatttgtaatcatctaaaactggaaagaaccatcacgtaatggataaaagaatggtggctcgttcttgccatggaatacagctccgtaataaaaggcaacgaactgctaatacacgtaacagcatagatgcatcttgaatgcattgtgctgaatgaaagctgcagaccccagaggccgcatactgcatttttccgtttctgtgctgttagtatgaaacgcagagaacagatcagcagttaccagtggctgcgggtggac[360 bp omitted]gaacatcttggttgtgatactggctacatagctgcatgtttgtcacacctgttctctttatttatttttatttatttatcttagagacagggtctccctctgtcacccaggctgaagtacaatggtgcaatcacggctcactgcagccttgacctcctaggttcaagcgatcctcccacttcagcctcccgagtagctgagacaacaggtgcacgctaccacgcccggctaatttttctatttttgtagagatgtgctatgtttcccaggctggtctcgaattcctgggttcaagcaatcctcccacctcagcctcccaaagtgctgagattacaggtgtgagtcaccttgcccggccaaacctgtcctctttattaaaaatgcattttattgtatatatattacacctcgaataaactttaaaaataaagaattcgggtcaccaaagatttctttttcataatataattcattgttgtcaaaaaatgccagggaatggatcaccttacaactgctagaatagctatcatcaaaaagacgaaaggtaacaaacgttggcaaggatttgaagagaacacttatacactactgatggtaattttaattagtatagccattatagaaaatggtatggaagttccaaagaaaaatttaaaaataaaactaccaggtgatccaggaatcccacttctgggtctttatccaaaggaattgaagtcagcacgtcaggccgggcatagtggctcacgcctgtaattctagcactttgggaggctgaggcgggcggatctcccaaggtcaggagttcgagaccatcctggccaacatggcgaaacccgtctctaccaaaaatacaaaaattagccgggcgtggtggtggatgtctgtagtcccagctactcgggaggctgaggcacgagaatcacttgaacccgggaggcagaggttgcagtgagccgagattgcggcattgccctccagcctaggcaacaagagcgagacgctgtctcaaaaacaaaaaccaaaaccaaaaaaccccacaaagttattgaaagaaataaataaaaataaatacgtaaataaaagaaggaaattctgacacatactagaatatacataaatgtatgtaaatgaataaatgaatatatgaatgtgagaataagaagtgagcgcgtcattttttaccgttctcccagctcaaaacgttttcgccccgtccagcttttcggcctcctccgggcgccccctgccggtgggccgcttgcccgtgctccaagcccaaaacagacgcgtcccctctagtcgcttttagccttcggtctcggtcctgattggctcagagtcgctcgtgatcccttttgggaaatgtagtccttaagggtatcgcgcctgctttttctatacgctctgacgcagagatagccacgggaagtacgtcaccaaatttcgccggttcccacaagctaggtcgtgtgacgctgcatgacgggaattgtagtcctcaaattgctagcttccgatgccatgcgctgcgactggaacgccaattcccaccatgccgcgcgctcacagctctcaggggctgtcctgtggcctttggggaagtgtagtcttgagcccccaagattccttttctgttctatggagtgggcccgcgcaaaggactccatttcccggcgtgctgccatccgtcgggtcgcggcagccattttgttccgcccgaggagaccctaagatggcggcgagggggacggtgaaggttgcctcccgcccgtccgggctctgatcctccgtctccccgtcccccggcggccggcccatggcctggcggaggcccgaaccatggacctccgcaccgccgtgtacaacgccgcccgtgatggcaagctgcagctgctccagaagctgctcagcggccggagccgggaggaactggacgagctgacgggcgaggtggccggcgggggaacgccgctactcatcgccgcccgctacggccacctggacgtggtggagtacctggtggaccggtgcggcgcgagcgtggaggccggtggctcggtgcacttcgatggcgagaccatcgagggcgcgccgccgctgtgggccgcctccgcagccggccacctggacgtggtgcggagcctgctgcgccgcggggcctcggtgaaccgcaccacgcgcaccaactccacgcctctccgcgccgcctgcttcgacggccacctggaggtggtgcgctacctggtcggcgagcaccaggccgacctggaggtggccaaccggcacggccacacgtgcctcatgatctcgtgctacaagggccaccgtgagatcgcccgctacctgctggagcagggcgcccaggtgaaccggcgcagcgccaagggcaacacggccctgcatgactgcgccgagtccggcagcctggagatcctgcagctgctgctggggtgcaaggcccgcatggaacgtgacggctacggcatgaccccgctgctcgcggccagcgtgacgggccacaccaacatcgtggagtacctcatccaggagcagcccggccaggagcaggtcgcagggggagaggctcagcctgggctgccccaagaagacccctccaccagccaggggtgtgcgcagcctcagggggctccgtgctgcagctcctccccagaggaaccactgaacggggaatcttacgaaagctgctgtcccaccagccgggaagctgccgtggaagccttggaattgctgggagctacgtatgtggataagaaacgagatctgcttggggcccttaaacactggaggcgggccatggagctgcgtcaccaggggggcgagtacctgcccaaaccggagcccccacagctggtcctggcctatgactattccagggaggtcaacaccaccgaggagctggaggcgctgatcaccgacccggatgagatgcgcatgcaggccctgttgatccgggagcgcatcctcggtccctcgcacccggacacttcctattacatccgttacaggggtgccgtgtacgccgactcgggcaatttcgagcgctgcatccgcttgtggaagtacgccctggacatgcaacagagcaacctggagcctctgagccccatgaccgccagcagcttcctctccttcgcggaactcttctcctacgtgcttcaggaccgggccgccaaaggcagcctgggcacccagatcggctttgcagacctcatgggggttctcaccaaaggggtccgggaagtggaacgggccctgcagctgcccagggagcccggagactcagcccagttcaccaaggcgctggccatcatcctccacctgctctacctgctggagaaagtggagtgcacccccagccaggagcacctgaagcaccagaccgtctaccgcctgctcaagtgcgcgcccaggggcaagaacggcttcacccctctgcacatggctgtggacaaggacaccacaaacgtgggccgctatcccgtgggcagattcccctccctgcacgtggtcaaagtgctgctcgactgcggggccgacccggacagcagggattttgacaacaacaccccgctacacatagcagcccagaacaactgcccggccatcatgaatgccctgatcgaagcaggggcccacatggacgccaccaatgccttcaagaagacggcctacgagctgctggacgagaagctgctggccaggggtaccatgcagcccttcaactacgtgaccctgcagtgccttgcggcccgggccctggataagaacaagatcccttacaagggcttcatcccggaagatctggaggcgttcatcgaactgcactgacctgcccagaacgcctgcaccctcacctctcccctctcctgctgagatgggggaaatccggctgcggcatagcagatgctcgttcttgcctccttcaggcaccaatcaggagaagggttctgcctcccatcccctctacctgcagacagggtcggaggtgttagcgagcctttggtgctagaagcctgcggggtcatgtgctaagaggacagtctttctccgggagcccgctcactcattctgagttaggaaaagacacaagaccttccccacatcctgtctgcctgggttagggaggcctttgccttgttacctagaggcggagggactgaagccattgcgttccttccctgctagaaacacaggaagaagttgaggactgtctgccttccctcgtccctttacctggccagataactccagccgctgaatacagtgttaggactgggggctcctgagatgagagtttgagattcagggaatgagaccacctctcatttcttccagcatgatcgcgccctgctcccgtgccaccgtagtccctggcagacaggcagggctctgcccagggcagcctgccacttgcatagctttcggttggtttggtgttctgtttatttaataagtgggcaggttgcaagcgttgcacagaaattctgagattttactgcctttttttttttttttaagaaagttgtttgttggactccataagtgaatttcaagcagtgaggattttgtggtgcctgagatggccgagggcacagggagtgagctgtatgtgtgaggaatttggtgagcgagataaaagtccacggtgtcaacccctaaaacatgggtgaccgtacatttttatacatctccactctacggccttttacaggctttccgattttacaggcctttccaagtttccattctccttagagagagaactgtgcttccaaacagaaatcaggagtgaccacaaagcctgaaaacactttgccacccagcaaagaactggcacaattggtttgggtctgcattgccatagtgcccgagttaaaactgcaggccactctgccttgcagtggcctctgatttcattgtgggtgcatccacaggtggcccgagctgttctttcagctgctccaaggattgagacccaagtcatcatgaaaaaggcccaagtacagtcttaatgcgataaatccactagctaagacgtcgagtgccaagaccagccttccagccgaggtttggacaaagtctcaggttcccgtgactcagggtaaggtgctggggctgccagaggacctgccccagcaagatttttgtcaagagcgagactccatcagcccaggcagacgggagcaggttcttggccagcgtagacagcagcaaacagcagcagggaagccattctcactgcatcctccctgcagtagccacggccaggcccttaggaggagcagtgaccgggggtgtccagaaatatcctgtccctggatggaaactaggtctcgtttggatttttttttttttttgccgtgttaggaaattatttattaatttacaagacaggttttaactcagccgaggtgggaaatggtgtccctgtccctcccaaagcacagagcacagaaatgaggccgtttacatggcgagtctccgtgctggtgtttaagtcattaaaaagatactcaaagagaatggcctgcctgatgcgtccttggcgtgggttaactggggaagtcggaggtgggtgagtcagtccatggcattggtgtgagtgaacagagagccctagggccacctcccctagccagaggggtttctgtgttacatactggggctttttttttttttttgagacagagtctcaccctgtcccccaggctggagtgcaatggcgcgatctcagctcactgcaacctctgcctcctgggttcaaacaattctgcttcagcctcctgagtagctgagattacaggcacctgccactatgcccagctaatttttgtattttctgtagaggcaggttttgccatgttggccaggctggtctcaaactcctgaactcaagcgatcctcccacctcagcctcccaaagtgctggaattacaagcatgaaccactgcacctggcctctatgttacatactggggctttgtgtaaaatttcatttgaaaaacagtatgttgctctttgaaaaaaagcctgggcaacatagtgagagcctgtctttacaaaaataaaaaataggctgggtacggtggctcacatctgtaatctcagcaccttgggaagcctgggcaacatagtaagacctctgtctctacattttttttttttttttttttgagatggagtcttgctctgtcacccaggctggagtgcagtgacgccatctcggctcactgcaaccgctgcctcccgggttcaagtgattctcctgcctcagcctcctgagcatctgggactacaggcatacaccaccatgcctggctaattgtgtatttttagcagagacggggtttcaccatattggccatgctggtctcaaactcctgaccttgtgatccactcgcctcggcctcctaaagtgctgggattataggtgtgagccaccacgcctggcccttttttgttttcctttatctgccatctcatctcacctccttgtgtaaacttgttccattctaaaattctggttttctccatatcagaacagtcaaacccccaccagaaagcaccaccccgttagctgggtccatgggattttgctgagcccctgccatgtgccaggcaggtttcaggcccccttggggataaggattgagctgtcgatatgaacgtccggttaatccctgtgcgcccgcctcacgtggcagtggggagaggccctgctgtggggcaccgcatgctgcttccatggtgcattgggttggagggctcttctcccgagggtgggtgtctcccatctcttgccttcacacacctgctgtcttgtttcatttgggactggacagtcccacaggtgacagctgttgggctgttgtatgcctgtttggtgttgcatcaaaggagtgggtttgaatcagcaggtgctctcaaagctgtctcctgggagacacagtactagtgagcatttattgagcacctactgtatgccaggcaccattttctgtggttaaatgcactgcctgtttacacaacagccctctaaaggaggaaaaacatatcagagtcccatggatggaagaaaaataatgaagtaggaaaaacggccctcttaagatgaaggtcatctttttttttttttttttttttttttgagacggagtctctgtcgctcaggctggagtgcagtggtgtgatctcggctcactgcaagctcagcctcccgggttcacaccattctcctgcctcagcctcccgagtagctgggactacaggcacctgccaccatgcccggctaattttttgtatttttagtagagatggg[132 bp omitted]ttcaggtgagggctgatccagcagatcccaattattcctaaagacctggttgatagctcccttgagactggggtggggtgggtgtcccaagatgaccgccagcagaaaagagagcatctttctcccagtcaaaagccaaagtaggacctatctaaagtaagtcctggccgggcacggtggctcacacctgtaatcccagcaccttgggaggctgaggctggaggatcgcttgagcctgggagtttgagaccatcatgggcagcaaagtgagatcctgtctctacaaaaaaaaaaaaaaaaaaaaattagccatgtgtagtgatatgtagtcccagctgctactggggaggctgaagcaggaggattgattgagcccaggagtttgaggctgcagtgagccttaatggcaccatcacactccagcctgggcaacagagtgagaccctgtttcaaaaaaacaaagcagggccggg[174 bp omitted]gaggcag[136 bp omitted]ggcaggcgggggaactgaggctactaagagacattaagatgcttaaggacagccgggcgcggtggcagacgcctgtaatcccagcactttgggaggctgaggcgggcggatcacgaggtcaggagaccaagaccatcctggctaacacggtgaaaccccgtctctctactaaaagcacaaaaaattagccaggcatggtggtgggcgcttgtagtcccagctactcgggaggctgaggcaggagaatggtgtgaactcaggaggcggagcttgcagtgagccgagatcgcaccactgcactccagcctgggcgacagagcacaagactccatctcaaaaaaaaaaaaaagaaagaaaaatgcctaaggacacagcgcatgaaggaagggtcgagattggaacccaggaccgtcagagttcataccttgtgctgattctccatccgggacgccagacacatggatccctttcccctgctttctggtgttgttttggcacaagctctcccatccctggggcaggtggccatcctgcctccgcatcctgagcgtctgtttccctcggggatctgccagactcagccccctaaccccaagaaaatcactcacaaaaatcatctgagctaaatgcttgctttgaaagctcagacctggggattgtaactttagcctcataccttctaatgaaggccatcttaaagctctaccagtttcagctgagggccgatccagcagatcccagttgttcctaaagacctggttgctagctcctctgagactggggtggggtgggtgtcccaaggtgatgaccaggagaaaagagagcgtcttcctcccagtcacatcccaagattcgtgaccgagcgcggtggctcacgcctgtaattccagcactttgggagaccgaggcaggtggatcacgaggtcaggagttcgagaccagcctggtcaacatggtgaaaccctatctattctaaaaatacaaaaaattagccaggcacggtggcaggcacctgtaatcccagctacttgggaggctgaggaaggagaatcgcttgaacccgggagatggaggttgcagtgagccgagattgcaccactgcactccagcctgggcaacagagcaagactctgtctcaaaacaaaacaaaacaaacaaacaaacaaacaaacaaaaaactaaaaacatcaagatacgctctgattggaccagcctgggtcccatgttcttccatgacccaatcctagtagcccaggagtgggatgtgccaattggcttggcctgaggagggcccccagagggtctgtaatccatgtgtaactggagttgctgtaaaatggggccatctggctgggtgcggtggctcacgcctgtaatcccaacactttgggaggcc[134 bp omitted]gaggcaggagagtggcgtgaacccgggaggcggagt[137 bp omitted]taaaatgactacctgccgttgatcagtgaagaaaaaagctcagagagctcaagtggagtacctaaggccacacagccaagagggagagccaagtcgtttgtggttaaatgtcctgcctgtttacacagcagccctctaaaggcggaaaaacatgtcagagtcccatggacgggagaaaaataagaataataataaagtaggaaaaacagccctcttaagaggaaggccatcttaaagctctaccagcttcaggtgagggctgatccagcagatcccagagaaacaggctcacagagaggggagggggcttgtctaagcttacccagcccggaagcatcggggtcaaagcttaaccccctgctggaaggtgtcgagagccaggcagccaagcctgacctgggagatggggaagtgggggcccccccaagctcgccgactgcccttcccagcctgctgccagtctgattccacagaactgaagtcgggacctggagttctgctcattcgctcatctactcagtgactttcttagaccctccccagcactttgagggtgtcagtcactgctgcgtcctcagcacccacgccagggtctgtcccacgccaggtggcctgtaaatatgggctgagcaagcgaacagtgaacgagttgggaattcacatcctcctctgactacttggggcagcagcaggggacacaagcaggcccctatggctttgccagaccccgggtgccgccgcccccatggaattgcaggactgttatctgagcaacgtcgacgggggagaacacccctgcccgaggttaaagatagcaccgctcgaatcacatcacaggccgaaaaggccagatgacccaccagggacattgaatccgtgtcccgagaggggtggggcgggggtgtggattcctgcggggagcttcgggactggaaaaaacagagggtgctctgaccgagtgtttaccaaaacatgtattaggcaagacccgggccgaatgtgggtggcaccgcccctgtgctgggccaggagaatgtgcccgcaccggtcccagatcctgtttccccagtgggttgtacaagacaccttgaacttctgcatgaactgggacattcagaattccctggagcaaccccctccctccaccctgtgccttgatatctcctattaaagcttgtgtttgaatgtctgttaatagacatgatttaattattgatattaattcaaatgtattaatttgaattattaacttattaatcatttgatgtcgattaaagcaatgatcttgatccaatgtcatctcctccatgaagtcttcctggattatctaaggtgcagccccacagccagggacagtggttcatgcctataatcccagcattttgggaggctgaggtgggagggttggttgagcccaggagttcgagaccagcctggacaacttagtgagacccactcccctcatctctacaagaaatatataaaaattagctgggtgtggtggtgtgcacctgtgatcccagctgctcaagagactgaggtgggaggattgcttgagcccaggaggtggaggctgtagtgagctgtgattgcaccattgcacttcagcctgggtgacagagagagaccgtctctaaacaaacaaacaaacaaataaataaatacgagttgaatggcatttacatttttttttttttttgagacggagtctcactgtcgcccaggctggagtgcagtggtgcgatctccgctcactgcaagctccgcctcccaggttcacgccattctcctgcctc[220 bp omitted]agatataatttgcaaaacataaaattcaccattttaacatggataattcaggggcttttagtacatttacaaggctgtacaaccatcaccaagatctaattcccaaaaaataaaggttgattttcaaagcctatttaaagaaaaatattaactggctcaagcaatagaaaatatattaaagagccagccacaatggcatgtgcctataatcccagccacttaggaaggtgagatgagatcatcactgaaggcccagagttcaagactagccaacatagcaagacccc[146 bp omitted]aaccccgtctctactaaaaatacaaaattagctgggtgtggtggtgcatgcctgtcatcccagctactcgggaggctgaggcacgagaatcgcttgaacccaggaagcagtggttgcagtgagccaagatcgtgccattgcactccagcctgggcgacagagtaacactttgtctcaaaataaataaataaataataaaaaataaaaatagagacaggggtctcactgtgttggccaggctggtcccaaactcctgggcttaagcgatccacctcagcctcccgaaatatggggattacaggaaagagccactgcgcccagacactccttttcctgggaagataaaaagttttgcagcttcccttggaaactggaaaccgtggcagcctcccagggctataataaggccacagccagtgaacaggttaaaaataaaagatccccgcccaggggcacttggggatggcatttgtgagcccaggcaaaccccagggctgcagcgagacactcttgggggaggggactggagaagagcctgctgtgtggcctcaggctggcatctgccccctctgggctccaattgggctggaaacaacattagacagtgatttccaaagatcccacacctgcgcacccctgacgattaactctggctttaatttgtctctgaggggcctttctggctcatcctagtcccggccttgcagtctcattgtgtgactttgcaaagcgacactacctctctgtgcctcagtttctccatctgcacaatggggcaaagaaagccctggtgacctgccgatggggataggtatttggctgtcattattgttgcaatgtattatttatctatttatttatttttatttttatttttattttttgagacggagtctcgctctgttgcccaggctggagtgcagtggcgcgatctcagctcactgcaacctctgcctcctgggttcaagtcattctcctgcctcagcctcccgagtaactgggactacaggcacccgccaccacacctggctgattttttgtgtttttagtagagacgggttttcaccgtgttagtcagggtggtctggatctcctgacctcatgatccgcccgcctcggcctcccaaagtgctggaattacaggcgtgagccaccatgtccggcctatttatttatttttgaggtggagtcttgctctgtcacccaggctggagtgcagtggtgacatctcggctcactgcaatctccacctcccgggttcaagtgattctcctgcctcagcctcccgaatagctgggactacaggtgcctgccaccacgcctggctaatttttgtatttttagttgagatggggtttcaccatgttggccaggct[131 bp omitted]ggggactgggcacttttcagggagccccctttgggctctctctttggagcaggcccgggaaagagggaccgtcccctcctcagccggggtcgggagaggctggaaccgctgtccgatggtgccctctggtgacactgttggctcattgcggcaccttctgggtccccacagatagttcatgcgccccctgcctccaggcttgggggacacaaggcctgcaccacggtgggccacactggctcccctcggtccctcggagggtccacgctccctcctacccctcagggttgttacctgtgccatgccctccacctggagtgccctttccttcctgggggctgcagagagctctgagcactactggtgggttcaggtccctgtccccgggtccccaccccctattacttctgcatccccatcacacccagggcaagcccacacgagaccacccattcctgtgtctgcctccccttggagctgtgagccctatgagggcagcaacgggatccgtcccagaaaacagcgttcactcgatctgaagccatcccaggcatacagtagatgctcaatacacactgctcaacgagggaatgaacggataatggggggaatgaacaaaatacaccggctagcaggaagcgaacgtggaatcgagaaacggaaaaactgacttgaggccaggcgcagaggctcatgcctgcagtcccaacactggaaggccaaggcgggaggattgcttgagcccaggagttcgagaccagcctgggcaacatggtgaaactccatctctacaaaaaatgtagggccgggcacagtggctcacgcctgtattcccagcactttgggaagatgaggcaggtgaatcatttgaggtcaggagttcgagaccagcctagccaacatggtgaaataccgtctctactgaaaatacaaaaaaattagctgcgtgtggtggcacatgcctgtaatcccagttactcaggaggctgagatgggaggattgcttgagcctgggaggtccaggccgcagtgagctgtgatcgcaccactgcacttcagcctgagcaacagtgagaccctgtctcaaaaaaaaaaaaaaagcagctgggcatggtggtgcatgtttgtaatcccagcactttgcgagcctgaggctgagctggacagattacttgaacccaggagtttgaaaccagcctgggcaacacagcaaaaccccatctttacaaaaattacctgggtgtgatggtgtgcacctgtggtcccagctacgcaggaggctgaggtgggaggattgcttggcctggaagtgttgaggctgcagtgagctgtgatcagaccactgcattccagcctgggtgacagagtgggaccttgtttcaaaaataaataaataaataaattaattaattaattaattaatttttaaaaagacttgggcatccaccgggtgtggtggctcacacctgtcatcccagcactttgggaggccgaggcgggtagatcatttgaggtcaggagctcgagaccagcctgaccaacacagtgaaacactgtctctactaaaaatacaaaattagctgggcatggtggcgtgtgcctgtaatcccagctacttgggaggctgaggcaggagaatcacttgaacccgggaggcagaggttgcagtgagccgagatagcaccactacactccagcctgggcaacaagagtgaaactccatctcaaaaaaaaaaaaaaaaaaaaaagacttggggatcaattcaaattcaaacatttattgagcatctgctatagaccataccttgggatcccacaataaagcccacggacaggcagaccatagacatgtgggccatgaataagttgattgtatttgtctcaaactccaaagtgctgtggaaagatgaagcctattcaggggatctggtgggttctgttttgaatgaattatattatattatattatattatattatattatattatattaatttttatttttttgagacagggtcttgctctgtcacccaggctggaatgcggtggtatgatctcggctcactgcaacctctgcctcccaggttcaagcaatcctcctgcctcagcctcctgagtagctgggattacaggcgtgagccacagtgcccggccaattttatttaattttttaattttttttttttacaggtaccaccaggcccagctaattttttgtatttttgttagagatggagtttcaccatgttggccaggttggtcttgaactcctgacctcaaggcatccccctgcctcggtttcccaaagtgctgggatgacagacgtgagccaccatgtccagccttgaatgaattttaaatgaggagcacgc[132 bp omitted]tcccacctcagcctctggagcagctgggacaacaggtgcccaccaccagctcagccagacggtgatgtttgagcaaagatctgaagcaagtgatgagggagccatgtaggtacctgggggaagggcattccaggctgaagtcacagcctgtgcaaaggccctgaggcaggaccgcacccaacatgttataggaacaacgggaaggctcacatggctggagcagagtgacaaaggccagaggtcaaggcagatgtaaaactgaccctggatttaacaacacaagatcaccaaggaccttgagcagagcagtttctttttattctttttattttatattttattgtatttttttgagacagaatctcgctctgtcgcccaggctgcagtgtaatggtgagatctcggctcactccaacctctgcctcccaggttcaagcgattcttctgcctcagcctccttagtagctgggattacaggagtgagccacagtgcccggccaattttattttattatttatttatttatttatttattttcagacagagtcttgttctgccgcccaggctggagtgcagtggtgagatctcggctcactgcaacctctgcctcccgggttcaagcgattctcctgcctcagcctctcaagtagctgggattacaggcgtgtgccaccacgctcagctatttgttgtaatttttgtggagacggggtttcaccatgttggccaggctggtttcgaactcctgggctcaagtcatccaccagcctcagcctcccaaagtgctgggattacagacgtcagccaccgcgcctggctgagcagagcaatttctgggacatgcggctggggtgggtggtggatggtaatagtttcacaggaaggacaggacaggaagaggatcctgggggaacttctggaaattctgttctggtgcaaagcctgtaggaagtgaagctgcaccctggcccctgccttccagaagggccctttattttcatggccagaggggccaagcgggtcctggctgtgcagcctcagaaacttcctctttcagttcctggagggagcccgcagggtctgggtcatgcagtctctagcttgagcagcagggtgacccctggcaaaggctcagcatcatgccaagcccaggagggcaacagatgcttctagaagaaactaagggccgggtgcagtggctcacgcctgtaatcccagtactttgggaggccaaggcagtaggatcgcttgaacccaggagtttgagatcagcctgggtaacatagtgagattcttgtctttacaaaaaaatacaaaagttagccgggtgtggtggtgcctgcctgtagtccccgctacctgggaagctgaggcgggaggatcgcttgagcccaggagttcaaggctacagtgaaccatgatcttgccactgcactgcaggctgggtaacagaatgagaccctgtctcaaaaaataggatgggcatcagaaaacatattcatgttttgctcagtgagagaaggcagacacaaaaggccacacagtgtgtgatccaatttctttctttttttttttttctgagatggagtctcgctctgttgcccaggctggagtgcagtggcgtgatctcggctcactgcaagctctgcctcccaggttcacgccattctcctgcctcagcctcccgagtagctgggattacaggcgcccgccaccacgcccggctaatttttttatatttttagtagagacggggtttcaccgtgttagccaggatggtctcgatttcctgaccttgtgatccacctgccttggcctccgaaagtgctgggattacaggtgtgagacaccgcgcccggccacgtgatccaatttctgtgaaatgttcaggacaggctcatccacagaaacaggaaggggatgcatgggtgccggggctggggggaggcagtgggcagtgtcagctgatggttccagtgctgctttttggggtgatgaaagtttctgaaattagatagtggcaatagttgcataatatagtgaatacagtaaaaaccactgatgtctccacttaagaaataacaggaccaggcgcagtggctcacgcctgtaatcccaacactttgggaggccgaggtgggcagatcacctgaggtcaggagttcgagaccaacctagccaacatggtaaaacccccgtctcctactaaaaatataaaaaatagctgggtgtggtggcgggcccctgtaatcccagctacttggaaggctgaggcacaagaatcgcttgaaccaggaggtggagatcacgccactgcactccagcctgggtgccggggcgagacgccatctcaaa[133 bp omitted]taaaccccgtctccactaaaaatacaaaattagctgggcatggtgacgcatgcttgtaatcccagctactcaggagttcaagaccagcttggacaacatatgtgaaaccccatctctactaaaaatacaaaaattagctggccgtggtggcgcatgcctgtaatcccagctactcggaaagctgaggcaggtgaattgcttaaacctgtgaggcgaaggctgcaatgagctgagatcaggccactgcactccagcctgggcgacagagtaagagttggtctcaaaaaaatatgtatcagaaagagatcattccaagcaggcacatatagctgcccagcccggtctggctgtgtgtatactgacttccagaaagaaatcctctgtt[139 bp omitted]atggagaaacctcgtctctactaaaaacacaacattagctgggcatggtggtgcatgcctgtaatcccagctacttgagagactgaggcaggagaatcgcttgaaaccgggaggtggaagttgcagtgagccaagatcgcgccactgcactccagcctgggcaacaagagcaaaaactccatctcaaaataaataaagaaataaatgggacattttcttatttttttttcttcctatttttcttcaaggctgttaggctcccagggaatctgggctttcgtggccacgtggggccggcgggcggtggccaccagagggcgctggggcagcgcaaatcgcagctgagcccctagagctggggacctggtcctgcctggagctgccttccagaccttccagaccttcacccatgctgtaccaccttctagaactctctccccgcccgtggctcattccaatgaaggcctgaggtcttagcttacttccttctttcagaaacttcctttaatctccccaggccagtctagggtcccctttggggtcccacagcttccccatcagagcccccatcaccccataactgcctaatactgtctgtctccagcactggacaacatagatttcttttcttttcttttcttttctttttaatggagtttcgctctgtcatccaggctggagtgcagtggtgcgatctcagctcactgcaagctccgcctcccaggttcacgccattctcctgcctcagcctcctgagtagctgggactacaggcgcccgccaccacgcctggctaatttttttgtatttttggtagagacggggtttcaccatgttggtcaggatggtcttgatctcctgacctcgtgatccgcctgcctgggcctcccaaagtgctgggattacaggtgtgagccactgcgcccggcctctttctttcttttttttgagacagagtctcactccgtagcccaggctggagtgcggtggcgtgatctcggctcactgcaacctccacctcccaggttcaagcaattctcctgcctcaggctcctgagtagctgggattaaaggcacgcatcaccacgctcggctaatttttgtatttttagtacagacagggtttcaccatg[136 bp omitted]caggctggagtgcagtgacaccatgatatctcactgcagccttgacttcctgggctcaagggatcctcctgcttcagcctcccagtagctgggacagcaggtgggtgccaccaagcctggctttttatttcattatttcatttcatttcattgagacaggattctcactgtgttgaccaggctgatctcaaagtcctggcttcatgtgatcctcccacttcggcctcccaaactgctgggattacagacgtcagccaccgtgcccgaccctcagggcattcaaaatgaccctgctttacagatctacaggaggtatgtggagacagctgggaatgggagttccagacgtgaggtc[142 bp omitted]gaggaaaccctgtctctactaaaaaaaaaaaaaaaaaaaaaaaaaaaaatttagctggatgtggtggtgggtgcctgtcatcccagctactcaggaggctgaggcaggagaattgcttgaacccaggaggcggaggttgcagtgagccgagattccaccattgcactccagcctgggcaagaagagtgaaactctgtcacaaaatagaagaagaagaaagaagaagaaagaagaagaagaggaagaggaagaggaggaggaagaggaagaagaagaggaagaggaggaggaggaagaagaagaagaagaggaagaggaaggctgtgtcttgccccaagtgccacactatctcagggagaagcaggggcttgaacccgctgttcctgctgccgaggccagcctggctgacctgggacaagtgaaggttcctgggccgaattctttttcagtcactttaaggaacaggaaagggtcctctgaactgggcaggccctgaatgtgcccacatctcctctgctcttgtctctacctggtccagccccagccaacatcactcacccagaccagtgcagtcgcctccaccctggtgccccagcatcagccctggcccaccaaggtctgtcctccctgcagcggccaccagagggcacctgtgagcactggagtcaggtcctgtccctcctctgcccacagccctgcatggctcccacccgcctgggggtcaaagcccaagacctccccatgacccaccaggccctgcttaacctgccccatccccttttcgccctcccctcctccctctctgcccgtcgctcactctgctccagcctcctcgctgttcctccaacacaccaggtgccatctgcccccagggcctttgcatgggctgtgccctctgcctagaaggtcattcccactttcacctccagctcttcccatgactgactccttttcttccccccaggtctcaactccaacaccccctcctagagagccccttcggccacccctgctgaaatt[136 bp omitted]ctgcctcagcctcccgagtagctgggactacaagtgcccgccac[187 bp omitted]gctggagtgcaatagccccatctcagctcacagcaacctctacctcctgggttcaaatgattcttctgcctcagcctcccaagtatctggaattacaggcgcgtgccaccacgcctggctaattttttgtatttttagtagagacgaggtttcaccctgttagccaggatgatctcgatctcctgacctcatgatccgcccgcctcagcctcccaaagtgctgggattacaggggtgagccaccgcacccagcccgaaggctcttcactttctgaaactattttgctttcttcttttataatttgtttactattccttcctctcctcccctacggaaatgacagccaatgactaatcacttctgtctgctgtctgggacaactcccagcacacagtaggcgctggatgaacgttggtcaaatgaaggaatagccagttcactgcccctgctcaggtatttgcagctggttccggcctggatggtccgaaaccctttgttgggaacaacctcactgcaccctggaatctcatctcagaactccactccccaggtttcacttctgggccgctgcggctgccaccgggaccagagctctgacaaagtctgagtcaacaactaaaatagcaagtagtgcatggctgctgggtgattcacaccagcctgcttccatgtggcctggcaatggaggaaggagcctgcaaagtcaaatcaggttgtcaggagggaggggctcctcagcttcccagctcagtgagtccagtttcaccttcgaggaccctcctttgtttcctcccttggaagttcagctccttccattgtgattccccgtttctgatctgtgtgagttttggagtcagaattaatctctttaggcctcggttttccccatctgtaaggtgggtccataatagaagcttctaccttgaggggtcattttgaggatgaaaatgtgtttgtttatttatgtatttaattttttgttatatagatgaggccttcctatgttgcccaggctgatctcaaacgtctggcctcgcctccttacacgccaggacaacgggcctgcaacaccgtgcctccctatttatttttattttattattttattgttatttttggagatggagtttcactctcgtcacccaggctggagtgcagtggtgcaatctcggctcactgcaacctccacctcccgagttcaagcgattctcctgccttagcctcccaagtagctgggattacaggcacccaccaccacacccagctaattttgtatttttagtagagacggggtttta[132 bp omitted]gatacagagtcttgctctgttgcccaggctggagtgcagtggcgcaatctcagttcactgcaatctccgcctcccaggttcaagcgattctcctgcctcagcctcacaagtagctgagactacaggtgtgtgccccatgcccagctggtttttctatttttagtagagacagggtttcatcatgttggccaggctggtctcgaactcctgacctcaagtgatccgcctgccttggcctccaaaagtgctgggataacagatgtgagccaccatgcctggcctatttatttatttattttttaaaaagagttggatgtcttattcagttgataaataaataaatacatacataaataagaaagatgcggctgggtgtggtggcttacgcctgtaatcccagcactttaggagcccaaggcaggtggatcacctgaggtcaggagtttcagaccagcgtggccaacatggcgaaaccccatctctactaaaaatacaaaaattagccgggtgtggtggcgagctcctgtaatcccagctactcgggaggctgaggcaggagaatagcttgaacccgagaggtggaggttacagtgagctgagctctcttcactgcactccatcctgggtgagagagccagactccatctcaggaaaaaaaaaaaatagagatggggtttcattatgttgcccaagctggtcttgaattcctggcctcaagcaaccctcccacttcaacctcccaaagttctgggattaattacagatgtgagccaccacagcacccagtcttgtttatgtatttagacactccagaatcaatacatgttaagtgtccaacaaaccttggctccattcttattcttagaaggtctgtcaccctgaaaaatattaatcccttccatgtgggtccccatacttaatgagtgctgcacctgctacccaggtatggtgtacctgatatgtggttctgcatatgatccgctgaggccttgaaacaacagcctccacagacccatttctcagatgaaaaagcagaggctccgacaggggaggcacttgccaaatgtcacacagtggcatcggagtccaaccttggtgggggcatcaaaggcagaccccaaagaaaaaggaagggctgcagcaaaaactgctaaatgtcccccaatggcattcattcaaattcatgcatttattcactcatccattcattcactcactcattcattcattcactcatcctttcactcactcatccattcactcattcattcactcactcgttcattcattcactcattcattcactcactcgttcattcattcactcattcattcactcgttcattctttcactcattcattcactgactcgttcatttattcactcactcattcactcattcattcattcactcactcgctcactcattcattcattcattcattcattcattcatagctcactgcagccttcggctcctgggctcaagcaatcctcccacctcagcctcctgagtacctgagactacaggcgtgcaccaccacgcccagctaacttttgtatttttgaagagacgcggtctcaccatgctgcccaggctgcaccctccccgccctcaacaatatcttttccctccacctttcctggtattagaaccccgactcgggaggcacacggccgttcagaaaggactacatttcccagggttccttgcggcaggagcagggccatgtgattatattctggccaatgggatgagggcaaaggccggtctatgccctccaagaagaggcgtgcacttcccgcttcctgttcccttttgcgggagcgggagccacgtgttttataacaaatagccaggcagaaggtgtcccagaagacaatggcgctgcggaagcattcaataaatatttattataattaaaagaccgtagcaatacccccaccaccaagacccttcacccagaaatagagagattggaattgtaaacaccgtatccagttctgaccaccctgaaagccagggcatcatcgcgcccgttttgtcctaaatgaagggctcccggacaatgtcctgaaagtggcagatgacctcatcttccactgtccacagggcacagggcagaccggggtgctctatggggtcctggccgatgcctgggtccaggggtgttccccaggtggtcaggcaaggacacgcggtcattctgcctcctgcgtcttgtcctcgggcgcctgggaccctctctggttccacatgtggttgttcagccccagctgtaccatctgtgcgtggtggataatgaggggttgcagccctgggctctgagggggtgcgggtgaggccgtagggaaggctggggactgcgggaagggcagtgactgtggaaaggctgctggctgtggggagggcggtgggggggtgccagcctgccatgcgtgcaggggtggcggctgcgggcaccccggccaagtgggaaagggtggcggggctcccaggggcacctggcccccaaagggcattcgagccccatagggcgccccagtcccaaatgacatgtggctcccaaaagccacctggagctgctccatctgtgcctggtaggacaagtagctctggaggtaggctgagtaggctgcgttcagtgccgccgcctgcatccgctcaccgtccaggtgttggctctgttcccgcagggctcgggtgtcctgttccttcctccacatggcctttcgggcctgaagcctgtggggcttgaaggtgttggccaccttcctggcgaagatctgggagtgttcgtccagccgcaccagcccggagagcaggctggccgtgtcggagctgagctgggccggggagctctccaggggcaggaaggggatgacacagtctggcgacccctgtcgcgtgaggttgctcatcatggcttggttcacctggtgcaggctcaggcgacagtcgaagttggaggtgagaagtaggatgatgaaagctgagtggtctatggcgtcctgcaggcagctcagctccccgcgccccggcacctggaaatcctcgcagaaggtggccccgtcgggcacgccaagggcctccagcttctcccgaacccgcagggcgatgtgttcgtctgccctggcgtggaggatcacaaagttatagaatttctgttccgatgatgattccagggaggaagggaacagggaggagggggtcaggtgagctgaacaaggagtagatgaaggaggaggaggaggaggaggaggggatgtttctggggtggtgggagtaggtgggcacggcttggtatttggagaggtggtatcttctacagaaagttggagtggcgtctggtctttgacagagcaggggtttttgaccggctccagaataggcaaggggagagactgggggcctgcagacccctcggtgcactccactgggtagttggtgctggtttctggagctgcgggggtatcagggaggccagtggaggttgcatctggggccacttcgggaagcccaggaggtgggctgcttggcagctctggtgggctggcaatctcccccgatggcggccagctcatctcctcaggctcctggcagccaccggggacaggctcgggcaccaagctggcctgggggtcgtcacagagcttgctgggcccatgtgggctgcggtgcaggctgaggaagggcatggtaggggactggctgatttccaagttgctggccagggaggcagggctgccagtggatcgcagggagcacccttggctccagtccgaaacaccgtcaatggggcgtgggaggctcctggtcccagagggcaaagccgaggatggtgggaggcagcccagattggactggagcgtccggatgctccctggatccccagcaatgtcccacccacaccggtttcgggcctcatcctgaagttcccccagccggtggtcgtccctggagctgagggtgcggacggcttcctggtaggccacgtcccgcagcgaggcggggcacagcttctcctcagccagcaggtggtacaagcgggccacagcccaggacacatctgggggctcctctgggtcctcggtgctgtccacgccagcccactggcgggccaccagccgggccaccgcatcggccttcaatgcctctagagagatcctggcctcagtttcctggcccagcttcaggagaaccatggcatgcaggaggtcctgcccctggcagcctgggcgtggggtcttcagtttgtgcttcagatacaagagcttgtcctggcctgctgcacctagaatgtcgaaggcgctaggaagtgatgggcctgtgcaggccatgggcacaggtgggtgcagcctccggcagcagaagctggaggtggtgaaggcatgttccacactgccccccgccttctgcacgcccagtgtcccctacccattcactgttccaggttctgcaggagctgcccaagcagatctgtaggaaacaggagaagcaaacacacttacccccaagaaaggtcagcacgggaaggcggcccacacacccccgcctgctttccccgcctgccacccagacctagccaggtgaccttcggcaacacgtcgcctccttcaacttccatttcttcctctgcaaaatgctatgaggccagtgtggtggctcaggcctgtgatctcagcactttgggaggctgaagcaggaggatcacttaagcccaggacttcgagaccagcctgggcaacacagccagactccgtctccactaaaagtttaaaaattagctgggctgggtgagggggcttaagcctgtaatcccagcagttgtggaggccgaggcggggggatcacctgaggtcaggagttcgagaccagcctggccaacatggtgaaaccccgtttctactaaaaatacaaagaattagccaggagtggtggtgcattcttgtaatcccagctacttgggaaactgaggcaggagaatcgcttgaacacaggaggtggtggctgcagtgagccaagatcatgccactgcactccagcctgggcagcagagtgaaactccggctcaaaaaacaaaaaaagtagctgggcgtggtggcacgtgcctgttgttccagctactccggaggctgagatgggaagatcgcttaagcccaggaggttgaggctgcagtgagctatgatggtaccactgcactccagcctgggcaacagagtgagacccagtctcaaaaaaaaaaaaaaaatgctgtcatctgagacttacctggtgttacctgagaggtaaacactattacactattttccccatttacagatgaagaaagcaagacacacagaggtgatgtcacttgcccaaagtcacactatcagtggatggcagaagacggatttcaacccaggcagtctggctgtggaggctgtgtgcctaatggcatacacttacagacttgttttggggaattgagttggattaacacagagatacttctgagcttgatgactgaaagccagtaggtgctcaatacatgcttgctaaatagcctcggctgagcacggtggctcacacctgtaatcccagcactttgggagtccaaggagggcggctcacctgaggtcaggagttcaagaccagcctggccaacatggtgaaaccccatctctactaaaaatacaaaaaaattagccgggtgtggtggtccgcgcctgtagtcccagctactcaggaggctgaggcaggagaatcgcttgaatccgggaggcagaggttgcagtgagcaaagatcgcaccattgcactccagcctgggcaacaagagcgaaaccccgtctcaataaataaataaatagtcagccttctagatggtcctcaaggacccaacatcctggtatttgcagtcttgagcagtccttccaacactgtcccagcgttggactatgacattaacagaatatggcaagggagccaggcaccacatccactcatttttcaagagaagccagagatctagatttttagaaatccgctcattcttctcgggatgacaatcaattccaatatttttaagagactttgtgagtttaaaaaaaagtttgggccaggcgcagtggctcacgcctataatcccagcactttgggaggc[135 bp omitted]gaggtaggaaaatcgcttgaacctgggaggcggaggttgcagtgaaccgagactgcaccattgcactccagcctgggcgacagagtgagactccatctaaaaaaaaaaaaaaaaaagtttggagccaggcctggtggtgtgtgcctgtggtcccagctactcgggaggctaaggcaggaggattgcttgagccaaggaagttgaggctgcagggaaggatacatacatagcattcattcattcatttaagaagtaattttttggccgggcgcggtggctcatgcctgtaatcccagtgctttgggaggctgaggcaggtggatcacaaggtcaggagttcaagaccagcctggccaacatggtgaaaccctgtctctactaaaagaaaaataaaaaaaataaaaaataaaaaatttagccgggcatggtggcgtgtgcttgtaatcccagctacttgggaggctgaggcagaagaatcgcttgaacctgggaggtggaggttgcagtgagccgagatcgtgccactgcactccagcctgggcaaaagaacaagactccatcaaaaaacaaacaaaaagaagtaatttttagccaggtgtggtggctcatgctgctaatcctagcactttgggaagctaaggcggacagatcatttgaggtcatgagttcaagatcagcctggtcaacacggtgaaactcccgtctctagtaaaaaaaaaaaaaaaaattgccagacatggtgttgggcacctgtactcccagctacttgggaggctgaggcaggagaatcacttgaacccaagaggcggaggttgcagtgagccgagatcacgccactgcattccagcctggatgacagagtgaaactccatctcaaaaaaaaaaaaaagtaattttttcagcatctgccatgtattgggtactagtgaatacaccagtatgcagacaaggaaaaacagcaatggactcttccctggagcaactgactgtctaatggtatgttagttatatgtaatatataagcatcatatatattacatacgacaatataacgggcatgtgtggatacacacacacacttacatgcaaccacttatttgagggcttactacatgctatattgtgctccccatctgttctttaaactgggcacagtcctgcctcaggacctttgcactggctgttccctctgcctatatctctgttaccccccagatatccctatggctcactcccttaccctccttcatgtttttggttaagcctgtcctgatcccaccgtgcagatctccctttgacaggggccacaaaatatggcccacgatttttttttttttttttgagacagagtctcactcttgttgcccaggctggagtgcaatggcacgatctcggctcaccgcaacctccgcctcccgggttctagcgattcttctgcctcatcctcccaagtagctgggattacaggcatgcaccaccatgcctggttaattttgtatttttagtagagacggggtttctccatgttggtcaggctggtcttgaactcccaacctcaggtgatctgcctgtctcggcctcccaaagtgttgggattacaggcatgagccaccccgtccagcctttttttttgagacagagtttcactcttgttgcccaggctggagtacaatggtgcaatctcagctcaccgtaacctccacctcccggattcaagcaattctcctgcttcagcctcccgagtagctgagattacaggcgtgcgccaccatgcccggctaattttgtatttttagtagagacggggtttctccgtgttggccaggctggtcttgaactcccgacctcaggtgatccgcctgcctctgcctcccaaagtgctgggattacaagcgtgagccactgtgccggccaattgttttttagttttgtcttgttttgacacagagtctcgctctgtcgcccaggctgcagtgcagtggcatgatcttggctcactgcaacctccacctcccaggttcaagcgattctcctgcttcagcctcccgagtagctgggaccacaggcacccgccaccacgcccagctaatttttgtactttttatagagacggggtttcaccatattggccaggctggtctcgaactcctgaccttgtgtgatccgcccaccttggcctcccaaagtgctgggattataggtgtgagccactacacccagccaattgcttttataaataaagttttattgcaacacagacatcctcactcatttacacacatcgatggctgctttcccactagagtgatggagtagctacaacagagaccatggggtctacaaagtggaaaatattcactctctgacccttgacagaaaaagcttgtagacacctgggttatgagacaggcatgtgattttttttattttccattccacagaggggcaaacatgaccaagatcacacagctagtgactgacagagcagccatttgatgccaatgtttgtaactgtaacaccaaatgccttttaattagtatggggtatgactggctattatgggttcaatcgtgtctctccccaaaatcatatgttgaagtgccaacctccagtagctcagaatgtgactttatttagagaaaaggcctttttttggtttgtatttggctttggtgtttttgtttgtttgtttttgatgttgaaagtatttttatttggccgggcctgacggctcatgcctgtaatcccagcaatttgggaggtggaggtgagctgatcacttgagatcaagagctcgagaccagcctggccaacatggtgaa[141 bp omitted]cgaaactccatctctactaaaaatgcaaaaattatccaggcatggtggcgggcgcctgtagtcccagctactcgggaggctgaggcaggagaatggcgtgaacctgggaggcggagcttacattgagccaagatagcgccactgcactccagcctgggtgacagagcaagactctgtcttaaaaaaaaaaaaaaaaaaaaattagccaggcatggtggcatgcgcctgaaatcccagctactcaggaggctgaggtgggaggattggttgagcctgggaggttgaggctgcagcaagcaagctaagatctcgccactgcactccagcctgggtaacagagcaagaacctgcatcaaaaaaggaaaaggcagggggcattcagatacagacacgtaactgcacagaaggaagatgatgtgaggagacccagggagaaggcggccgtctgcaagctaaggagagtcctcagagggaaccaaccctacaacacctcgatcttggacttccagcctccataactgtgagagaataaatttctgttgcttaagccatccgggctggggcactttattaccacagccacagtagctaatacactgcagatacttgcagtctagatcagcctcaacactctctgtctgtgttgtccagtatggcagcccccagctacctgtgtctactgggcacctgaaatgtggctgtggtagtaaagagacactgaattttaattttttttttttttaggatgaagtcttgctctgtcgcccaagctggagtgcagtggtgcgatcttagctcactgccacccccctctcctgggttcaagttattctcgtgcctcagcctccccagtagctgggatcacaggcacatgccaccacgcccagctaatttttgtatttttagtagagacagggttttgccatgttggccaggctggtcttgaactcctgacctcaagctatctgcctgcctcagcctcccaaagtgctgggattacaggtatgagccaccatgcctggcttgaattttaacttttatccaattttttttttttttttttttttggagacagagtctcgctctgtcatccaggccggagtgcagtgacgcaatctcagctcactgcaacctccgcctcctgggttgaagagattctcctgcctcagcctcctgagtagctgggattacaggttcgcaccactatgcccggctaatttttgtatttttagtagagatggggttgcctcatattggtcgggctggtctggaacccctgacctcagatgacccacctgcctcggcctcccaaagtgttgggattacaggcgtgagcc[132 bp omitted]gaaatcccgtctctactaaaaatagaaaaattagccacgtgtggtggcgggtgcctgtagtcccagctactagggaggctgaggtgggagaatcacctgaacccaagaagtcgaggctggagtgagcagagatcacaccactgcactccaacttgggtgacagagcaagactctgtctccaaaaaaaaataaaataaaataacagagcctgcttaagggtggtggtgaggaggagggagaggagggtcgggagcggtggctcacgcctgtaatcctagcactttggaaggccgaggtgtgtggattgcctgagctcaggagttcgagaccagcctgcgcaacatggtaaaaccccgtttctactaaaatacaaaaaattagccgggtgtggcagtgtgcgcctgtaatcccagctgcttgggaggctgagggaggagaattgctggaacccgggcggcagaggttgcagtgaactgaaatggcgccactgcactccaccctgggcgacagagcgagactctgtcttaaaacaacaacaacaaaaaactacctatcaggtacgacagttattacctgtgtgatggaataatctgtacaccaaaccctgtgacatgccatttagctatataacaaacctggatatgtacccgttaatttttgtatttttgtagagactgggtctccccatgttgcctgggctcaagtgatcctcccaccttggcctcccaaagtgttgggattacaggcgtgagccaccgcggccggcattttatctaatttttaattaattaaggcagggtgcagtggctcatgcctataatcccagtactttagggggctgaggtaggaggatctcttgagcccaagagttcgagaccagcc[137 bp omitted]cacagtgaaaccctgtctctactaaaaataaaaaatattagcagggcatggtggcaggtgctggtaatcccagctactcgggaggctgagacaggagaatcgcttgaaccgaggaggcagaggttgcagtaagccaagatcacaccattgcactccagcctgggcaacaagagcaaaactccatctcaaaataaagaaacaaacaaataaataaataaataaaattaaaataaaaataattagctgggtgtggtggtgcatgcctgtggccccagctccttggtagactgaggtcagaggatcgcctgaggccaggagaatcaaggctgcagtgaccggagatcgcgccactgcactccagcctgggcaatagagtgagacgctgtctcaaaaacaacaaaataaaaaaggtatggaagatgcctcattcgtaatggaacattatattggaccatgttgggtatattgagttaaataaaatatattattaaatgcatttacatattggattaataaaatgtattattaggagatatatatatatatttatttatttatttatatattttggagatggagtcttgctccattttccaggctagagtgcaatggcatgatctcgactcactgcaacctctgcctcccaggttcaagcgattctcttgcctc[222 bp omitted]catctccactacagtccagtaatattggagtatggcccctttttgacacaaggaaacagaggtacagagaagttgagtaagtagtccagagtcacacagctcataagggatacagctggattggaacccaggctgtctggttctagaatccactgagctttttggctccttttaacattttcagatttaacacagactccagcttatgtggacctggttatggggcctgagaaacagcctcacctagttttaattaaactaatgttcaggaaataagcatatggcctaagtactcctctagagaagtggaggataaaaggtttttcctaataatcttaggaaataataataataataataataaaataatgcaggcacaatcggacaataagaaaaaggccagacggccgggcgcagtggctcacgcctgtaatcccagcactttgagaggccgaggcgggtggattgcctgaggtgaggagttcgaggctagcctggccaacatggtgaaaccccgtctgtactaaaaatacaaaaattagccgggcatggtggcgcaagcctgtaatcccagctattcgggaggctgaggcaggagaatcgcttgaacccgggaggtggaggttgaacccgggaggcggaggttgcggtgagctgagatcatgccattgcactccagcctaggctacaagagtgaaactctgtctccaaaaaaaaaaaaaaaaaaaaaaaaaaaaaaagaaaaaggccagatgcccagcttctatctctgttgtaagctctacataaaatgggataaaaatgaaaatgggctgggcgcggtggctcacgcctgtaatcccagcagcactttgggaggcc[134 bp omitted]gaggcaggagaatggtgtgaacctgggaggcggagcttgcagcgagccgagttggtgccactgcactccagcctgggtgacagagtgagactccatctcaaaaaaaaaaaaaaaaagatcctatattcaggtgggaccacaagtcggccaaaactttttgaaatgatcaagacaactacttggaatacggtccaatacccccaccccccgttaagttcgatgatccacgaatcaactgctcttcccacctcccggtgtttcctgggaacggttgtgtgtataacttaccaagcaaaaagcaaacatacattggcacgtaccctccaatttttagctgataagagggcatagatgataaagtgtggagaagggccatgctgggacagggtagcagtggggctgggcgtcatgctgaaaattcattgagtttaacacttagaattcacactcttttttgttttttttattttttttgagacggagtctcggtctgtctcccaggctggagtgcagtggcgcgatctcggctcactacaagttctgcctcccgggttcccaccgttctcctgcctcagcctcctgtgttgttgttttttgacaggatcttgctctgttacccaggctggagtgcagtggtgtgatcatagctcactgcagcctcaacctcctgggattaagaagtgatcctcccactcagcctcccaagtagctgggactacaggcacatgccaccatgcccagctaattattaatgttttgtagggacggggtctggaactcctgggcccaagcgatcctcccaccttggcctcccaaagtgctgggattacaggtatgagccactgcacccagcctacatgtcagtaaaatatatatacatatatatattttttgagacggagtcccactttgtcgcccaggctggagtgcagtggtgcgatctaggctcactacagcctccgcatcctgggctcaagtgattcttgtgcctcactctcctgagtagctgggattacaggagcctgccaccacgcccagataatctttttttttttttttttctgagaccgaatctccctctgtcgccaggctggagtgcagtggcgcgatctcggctcactgcaacctccacctcctgggttcaagcaattctcctgcctcaccctcccgagtagctgggactacaggtgcatgccaccatgcccaggtaatttttgtatttttagtagggacggggtttcaccatgttggccaggatggtctcaatctcttgatctcgtgatccgcctgccttggcctccaaaattctgggattacaggcgttagccaccacgccctgctagtttttgtaattttagtagagacagggtttcaggctgttggccaggctggtctcgaactcctgacctcaatcgatccgcctgccttggcctcccagagtgctgggattacaggcatgagccactgcgcccggcctgtataggactcttaaagcagtgcctggcacacgcatgccccacaaacattagcatgcaagactgaaacctccttgcaagaaggactcaggggagttttgcagaaaacacgacaaagccagccagacttagaatcatcaaggcaggaccatctccacctgaatgcctggcaaatctctaaaatcacgtggtctttcttctcattctctctgcccccccgggcctgaactcaactctatttcagtgactgccccagcttcccccgcccgcctcccctgcccactgccacctccaccttctcgagacccagcaagtttcatttctcactgtccatggctgggacaaagtccactcctcactctgaagagcaggcgcctggcgggacaaaaacacccatggggtaggagggttctggctctgccacctgccggcttgtgtggtctgtttctcagcctcagcttcctcatttataacacccacatgaactggtacttaggatgaatgggagtctgttttgaagctttcatgcgaaaatatggttaaaaagtttagatcagtgcccagcaaggagcaagagcttgatataataatattagtgtgacaataaatattggcagactttttctcttcctcttcctttttaaaaaaatttttgatttttaatttcatttctttttttttttttttttttttttgacacagagtcttgctgtgtcgcccaggctggagtgcagtggcgtggtctgggctcactgcaacctccgcctcttgggttcaagtgattctcctgcctcatcctcctgagtggctgggattacaggcatgcaccaccacgccccgctaatttttgtatttttagtagagacagggtttcgccatgttggtcaggctggtctcaaactcctgacctcaggtgatctgcctgggattacaggcgtgagccacctgcccagccccatttcattttttttagagacagggtctcactctgtcacccaggctggagtgcagtagtgggatcacggctcactgcagccttgaactcccgggttcaagtgatcctcccacctcagcctcccgagtagctgggactacaggtgtgcggcaccacacctggctaatttttgtatttttggtagagacagagtctcacccatgttacccaggatcctgggctcaagcaatccacctgcctcagcctcccaaagtgttgggattacaggcataaaccactgcacccggctaactttctttttgaatttttttgtagaggtggagtctcgctatgctgcccaggcttgtcttgaactcctgggctcaagtgatcctcccaccttgtcctttttaaatgttttaaccacctctcccactctccttcccacactctcatgcagcctttcatgcatcgaatatgcatttattgagcacctactaggtccaggaactgttcaaagtgccactgcatatcaaggcaggcacatctaccctcacagagctcccagtctggttcagggagaccaacagtaagcgagaaaataacccaagatcatttcagagaatgaaaagtaacgtgaaagccatgagccgggggctgtgtggctctgagagactggctgggaaggggctacaggggaccacggtggtcaagggaggcctttggggacaggaggtaacattgagctgagacctaaaggagctgagggaggaggctgggtggagatcagggaggaaagcttctggaaggtgaagccacctgcccaaaggccctggggcaggactgcgcctggtgagctggaggaacagtaaggaagcccatgtggctggataaccgttaggagggggagaaaggaagaaggtgtgtggtggtacagggtgtgaggttgggatcctgggtgtcagggaagagtttggggtgtcagggaggaatttggggtgtctgggaggaatctggggtattcgggagggatcctgggtgttggggaagaatccagggtgtcagagaggggtcctgggtgtcacggaggaatttggggtatcagggagggaccttgggtgtcagggagaaattcagggcgttgagagaaatatggggtgtgaggtaggaagcttgggtgtcaggaatttggggtgagaaggaatatggggtttcaggtaggaatcctgggtgttggggaggaatctggggtgtccgggaggaatctggggtttgggggaggggtcaggctgtcggggaggaagccagggtgctggggaggatcccgacagtgggggaggatctgggccaccagcgcggggagctggaggttgaggggaacgtcaacctcccaacgcgcggcgccaggccccctcctccgcaccggggccctaagagggaggccaggtggcctggagccctggcgagcggcacgggctcagggccaccccccacacccccgacaccttctccacctcaggcccgtcctcgccccttccccacctaccagggatccggggctgccggctgcgccactgggtcctggggtcctgggggctggggcttctgcggagttgcccgcggaccgtagcgcgctgagggcgctggctccaccccgcggcccgcgccctgggaaggaagcgcgccgccccttccgcgtcccgggtgggtgtgggacgtgaggtcacggtttcggagtcctgccccgcagcaccgggaaagtccccgggtcgccccgcacccatgcgctctcttcccaacccttgcggtcacgttcagcaagtgtgagcacctactgtctgcagggggccagaagaactcgcatctgctctcggggagcccacagtcatctgggcgggggtcccagatgagaaagtaatcacaattgtaaagtgggatcatctccgttagtgataggtgctttccaggaaataaatgtagcagctgtttttattttatttctcttattttatttgtttgtttgtttatttatttttttatttattttccgagacggagtttcgctcttgttgcccaggctggagtgcaatggcgcaatctcagctcactgcaacctccgcctcccgggtccaagcaattctactgcctcagcttcctgagtaactgggattacaggcatgtgccaccacacctggctaattttgtatttttagtagagatggagtttctccaccttggtcagcgtggtctcgaactcccaacttcaggtgatccacctgccttggcctcccaaagtgctgggattacaggtgtgagccaccgtgtccggcctcccttttttttttttttttttttagttggagtcttactctgtggcctaggctggagtgcggtagtgcgacctcggctcactgcaacctccacctcatgggttcaagcgattctcctgcctcagcctcctgagtagctgggattacaggcacgtgccaccacacctggctaatttttgtatttttagttgagatggggt[143 bp omitted]ggggtctccctatattacccaggctgctttcaaacttccaggctcaagcaatcctcccgcctcggcctctcaaagtgctaggattacaggtgtgagccaccgcacctggcctatattatttttatcaccacattaaataagatctaataatcacagtgattttgccgtggtgacaagtgtcagatgtgtttctggttgcaatgcaatctgaaagtatctgtggtttttattagggacaaacggacaaagtcccaggtcctgtggttgtcttcattaataattgagggaatggtaattatcagttagagtcagtgaaaataaagatgtgaaatttttttcctccatcagaattcacagacaccctgaacacccctaagaggctcagggaccccaggctgaagttcacctaaaagttcttgtagggagatagcaatggaagttatgttgatgtcaaatcccccacagttccccttattgagtacttctctccagtgagggagaaattttattgagcactgactgtgttccaggaacgtctaggctctgggaatacagtagcggggaagacagaaatggtcttacccttcagggtctccagggctggtgggggagagaaagttaaacacatcctcctggcctctctgtctcccaccccaaaattaccaattcaaggagtgtctcataggtgcttgtacccatgcaaaactgtgcccagactttttttttttttttttttttgagacagaatctcactcagtcaccaggctggagtgcagtggtgcaatctcggctcactgcaacctcagcctcccgggttcaagcgatcctcctgcctcagcctcccgagtagctgggactacaggtgcatgcccccatgcctggctaatttttgtatttttagtagagatggagtttcacc[136 bp omitted]caggccggagtggagtggcgccatcatagctcaaagcagcctccaattctgggcctcaagcgatcctcctgcctgagcctcccaagtagctgggactacaggcacgcaacactgtgttgaattattttttacatttttcttttagagacagggtctcactatgttacccagactggtccccgactcctagctttaagagattgtcccaatttggcctcccaaagtggtgggatta[132 bp omitted]ctgtagccttgacctcctggtctcaagcgatcctcccacctcagcctcccaagtagctgggactgcaggtgcatgccaccatgcctggctaatgtaattttttttttcttttgtagagatgatgtctttctatgttgaccaggctggtttcaaactcctggcctcaagcaatcctcctgccttggcttcccaaggtgttggaattacaggcgtgagccaccatgcctggcttgatcaatgtcttaaaacaaccgtttctccatcaaaatgggtttgatggttcccattttacagatgagagaacaggctcagagaaggtaatggctgaagaattcagaattccagggctgcagatgggtgaatttggccacttgcagagaggtgcagttgccccctctcttcttcagtgaaagaaacaggccgggtgcggtggctcatgcctgtaatcctagcactttgggaggctgaggcgggaggattgcttgagcccaggcgttcaagactagccctggcaacacagtgagatcccatctctacaaaaattaaaaataaagaaaaaatgagggccgggtgcagtggctcacgcctgcaatcccagcactttgggaggccgaggcaggtggatcatgaggtcaggagatcaagaccatcctggctaacacggtgaaacccctgtctctactaaaaatacaaaaaaattagccgggcgtggtggcgggcacctgtagtcccagctactcaggaggctgaggcaggagaatggtatgaacccgggaggtggagcttgcagagagccgagatcacgccactgaactccagcctgggcgacacagcgagactccatctcaaaaaaaaaaaaaaaaagaaagaaagaaaaaatgaggcatggcagcacgtgcctgtagtcccagctacctgggaggctgagatgggaggaccaccagagcccaagaggttgagactgtagtgagctatgatcgcaccactgcactccagcctgggcaacagagagaaaccctatctcaaagaaaaaatataaaaaaaaaaaagaaagaaagataatattccagtaaaagtccaagttttttttttactttccctctccaccacctcccctagaagcctccacc[139 bp omitted]tacttcagcctcctgaatagctgggattacagctgtgcgccaccacgcccagctaatttttgtatttttagtagagatggggtttcaccatgttggccaggctggtctcgaactcctggcctcaagtgatctgcctgcctcagcctcccaaagtgctgggattacaggcatgagccaccatgcccggcctctgttttccacttttgcacacatatccacagatccgtgatcatgatactgaatattcttcgatctgattttcctttttaattcgcataggccagagttcagcaaactgtttgttgt[131 bp omitted]cccgtctctactaaaagtacaaaaaattagccgggcatggtggcaggtgcctgaagtcccagttactcaggaggctgaggcaggagaatggtgtgaacctgtgaggtggtgcggcttgcagtgagctgagatcgcgccactgcactccagcctgggctacagagcgagactccgtctcaaaaaaaaaaaaatttactgtattccattgtcaatatatctttgacactttcacaagtcaacatatgtgtcatgtatgatattccaaaacaggcattgctaccttaa[136 bp omitted]atcctgggctaagtgattcttgtgcctcagactccccagtagctgggattacaggtgtgtgccaccacacccagctaatttttgtatttttaatagagagggggatttcaccatgttggccagcctggtctcgaactcctgacctcaagtgacctgcccaccttggcctcccaaagtgctgagattacaggcgtgaggcaccatgcctggcctgagttcaaattactactcagctattagtagctgaggtggggctgagggtgggctctctggattacacctcattttccctggagataatagcatctatctgatgggattgggaaaaagatcgggtgagagccaggtgcagtgactctcacctgtaatcccagtgctttgggaggttgagtgggaggtcgcttgagcccaggagtttgagaccagcctaggcaacatagcaagacccacatctgtgtgtgtgtgtgtgtgtgtgtgtgtgtgtgtgtataatttagctgagtgtggtggtgcacgcctgtagttcccagatactcaagaggatgaggtggggccagatgtggtggctcacacctgtaacctcagtactttgggaggccgaggtgggcagatcacttgaggtcaggagtttgagaccagcctggctaacatggtgaaaccccatctctactaaaaatacaaaattacatcctggctaacacggt[143 bp omitted]gtactccagccttagccgggcgtggtggtgcacgcctgtaatcccagctactcgggaggctgaggcgggaaaaccactcgaacctgggaggtggaggttgcggtgagctgagatagtaccactgcaccccagcctgggcaacagagtacaactctgtctcaaaaaagagcgaaaaaaaaaaaaaaaaaggctggcatagtggctcacgcctgtaatccagcactttgggaggccgaggcgggcagatcacttgaggtcaggagttcaaagccagcctggccaatatggcaaaaccccgtctctagtaaaattcaaaaattagccgggcatggtggggcacgcaccagtaatccctgtggctgttggttatagggagtggattcctatgtaacattcattgaactgtccctttaagattcatatacttgggtgcatatgaattcaacttgaatatggattaacaaagagaaagtaacatgtggttggtgatgggggaaatgaaccctctcaggacttagggtgggagtgaaaagactgacaatgatttgggcaacagtccagcagtatttagtaagactgagaatgtatcttctccatgtccctgggagaagtccctgaagttccccttctctgtagctaccgtagagaaacactgtagattgtcacttggatttttttccgagatggtatcttgctctgttgcccaggctggagtgcagtagtgcgatcttggctcactgcagtctcaaactcctgggctcaagtgaccctcccaccttaccatgcctggctaacttaaaaaaaaaaaatttgtgtagagatggggtcttg[141 bp omitted]tgtgagaaatcaatttctgttgctcataaattacccagcctggccaggcactttgggaggacgtggtgagaggaacgcttgagctcaggagttcaagatcagcctgggcaacatagcaagaccccgtctctacaaaataaataaatgaataaataaattaccctgcctaagatatttctgttctagcagcagggacagatgaagacacacacacgtacacacatggcctgtatgcagttgtgggtgaagtttattaaggcaatactgaataccagagcatttcaacaaggcttaccacacaggccccagtacctttctactctacaatgaggctcagaagctcagtgtaccaccccatccccaggaggcccacttagaccagaaatcccaagtccattagctacaggctgatattcagggacatcggtgtaaacaaagaagtgggatatgaactatatccctgatttttttttctttttttttttttttgagactaagtctcactcttgtcccccaggctggagtgcaatggcgcgatcttggctcactgcaacctccgcctctcaggttcaagagattctcttgc[137 bp omitted]cagcctcccaaagtgctgggattacaggtgtgagccaccgcacccggcctatattcctgatatttaacaaggaaaaaaaattctgcaggggagaactttcctgaaagatattttttctggacatctctctctactgactgatagggtgaggctcagaacaggcttcttccaagctcagagaggctgagagatgggtcaactgggtgatgcccgttttgagagccttagcttcccaagtggacagcacagaagagctgggaggagtggctagaaaataagtttgaaatgagccccgggttgaggactccagagcacagctgcattatagagacggggcccgctgagtcctctcctctccccctacttcttctcctccggggctttctcagtgattccaggggcaaagggtcccacgagccacgtgacaggtgtgttctgggccacatattccaccatgtggtccagggcctcgcgggcgctggcgacacgctcacggctctgggccagaatgctgctggacaggtcctggaaggagtggatgctggaaaacgtggcctggaggtcctccacctggcggcgggcctgctgcacctggtccttcacattggtggggaggccctgaatgctggaccccagggaggtacaggtggcctgcagttgctgggcaatgtcccggaacatggtgagcgcccgggactcgacctgctgagaagggagatggggacaccaatcaggaccatttgtttcaggaaaggcgatcggagctgaagccagggaaagaggggaagaggggttctaccactgaccttggggcaaacgctttccataggcgaaacttttttttttttttttgagacggagtctcgccctgtcgcccaggctggagtgcagtggcacaatctcaactcactgcaagctccgcctctcaggttcgcgccattctcctgcctc[134 bp omitted]ggcctcccaaaatgctgggattacaagcgtgagccaccgtgcccggcccttttttttttttttttttttgagatagagtcttgctctgttgcccaggttggcgtgcagtggcatgattttggctcactgcaacctccgcctcccaggttcaagcgattctcctacctcagcctcccgaatagctaggactacaggcgcgtgccaccacgcccgtctaacttttgcatttttagtacagatggggtttcaccatgttggccaggctggtcttgaactctacctcaagtgatcggccctccttggcctcccaaagtactgagattacaggcatgaaccaccgcgcccagactcttttcttttaattagaaacaggatctcactttgtcgcccaggctggagtgcagtggcgtgatcatagcttactacagcctgtaactcctgagctcaagttatcctctcatttcagcctgcctgactacaggcactcactaccacgcccagctacatttttaaaattttctgtagagccaggatctcactaagttgcccaggtcttaaactcctgggcccaagtgacctgcccacttcagcctcccaaaatgctggaattacaggcacgagccactgcatttggccactagtcaaattctttaaagggcatagacaaatcaccaaagaagatatagggagagcacatgaaaagctgtttgaccttataagtcattgaggaaatgcaaatcaaaaccataaggaggcctggcatggtggctcatgcctgtaatcccagcactttgggaggccaaggtgcgtggatcaccgaggtcaggagttcagcctgaccaacatggcgaaacccgcatttctactaaagatacaaaattagccgggtgtggtggcatgtgcctataatcccagctacacaggaagctgaggcagaagaactgcttgcacccaggaggcggaggttgcagtgagccaagatcatgccattgcactccagcctgggcaacagagcgagactctgtctcaaaaacaaacaaacaaacaaaaaccccagaggctatcagatgatacccactgtcagtcaagaggcggagaaattggaagcctcgtgtattgctggtggtatagttactttggaaaacagtctagcggttactcaaaatgttaaaccatagaatcatcatatgactcggcaattctagttgtgggtgtgtgcacaagagaaacggaaacatacgtccacacacaaagacatgcacacaggggcacagcaaaaagtagaaacgactcaagtgtccttcggttgataaatgggtgaacagaatgtgatccacccatacaacagaatgtgactcagccatggaacgtcatggggctctgacccaggccacagcatgggtgagccctaaggacgtcacgctcagcgcgagaagccggacacaaaaggccaaacagggtgtgatcccatttctatgaaatgtccaggacaggcccatccagagacaggaggggatacgtggttgggaggaggaggaaatggggcagtgactgctgatgggaaaagggtttctttttaggggcatgagatgagatagggatagttgcacaatgctgagaaccagcgatgtgtatgctttaaatgcgtgacttgtatggtatgcaaatgagatctcaataaaactgttaaaaaaaaaaaaaaggctgggtgcggtggctcacccctgtaatccccagcactttgggaggccgaggagggtggatcatgaggtcaggacgatcgggaccatcctggctaacatggtgaaaccccatctctactaaaaaaacacaaaaaaattagctgggcatggtggcgggagcctgtagtcctagttacttaggaggctgaggcagg[135 bp omitted]acaaaaagtggaagccaggctgggacagcctggaagaactttctaggcagaagttgtaaaccatccggggagaacatagttgaaatcaggtccttgaaaatttccttggccagagagtgagatgagcacagacagggttcgagaccagcctggccaacatggtgagaccccatctctactaaaaatacaaaaattaggccgggcgcagtgggtcaggcctgtaatcccagcactttggggggccaagacgggtggataacttgaggttaggagttctagaccagcctggcaaacatgacagaaccctgtctctactaaaaatacaaaaaaattagctgggtgtggttgcaggcgcctgtaatcccagctacttgggagactgaggcaggaaaattgcttgaacccaggaggtggaggctgcagtgagtcaagatcacgccactgcactccagcttgggtgacggagtgagactctgtctcaaaaataaataaataaatcaaattagctgggcgtggtggcaggtgcctgtagtctcagctactcgggaggctgaggcaggagaatcgcttgaacccgggaggcagaggttgcagtgagccgagatcatgacattgcactccagccagggtgacagagtgagactctatctcaaaaaaaaaaaaaaaaaaaaaaaaggcacacactgggaggtagggttttgcccagagccctggcagctggaggactctggacttgagcgagggattacgggagagtgcccacgtgagagagataagatctggttttttcatttgaaaagtcattctggctgctgtgcttagcagtcggggaaacaggagacagttttaggcagcaggtggtctagttctgcctcccgaacaatttgcatttatagagatattcaccatatctttatgcatgtcacttttgtagcccttactatgtgcttttgatatgatctcatttcagtttttaaaaaatcgatctgggtccgggcacggtggctcacgcctgtaataccagcactttgggaggccgatgtgggcggatcacctgcggtcaggagtttgagaccagcctggccaacatggcgaaaccccgtgtctactaaaaagtacaaaaattagccgggcgtggtgacgcatgcctgtaatcccatctactggggaggtggagacaggagaaccacttgaacccaggaggcagaggttgcagtgagctgagattgtg[151 bp omitted]cgcgtctctactaaaaatacaaaaaaaattagctgggcctggtggcgggcgcctgtagtcccagatactcgggaggctgaggcaggagaatggcgtgaacctgggaggcagagctggtagtgagctgagattacaccactgcactccagcctgggtgacagagcgagactccatctcaaaaaataaataaataaataaataaataaataattgatctggggtcgggtgtggtggctcatgcctgtaatcccagtgctttggaaggctgaagtgggagtattgcttgacaccaggagctcaagaccagcctgggcaacacagtgagatcctgtctctactaaaaattaaaaaaaaaattagccaggcatcgtggcacacgcctgtgttcccagctacttgggaggctgaggcgagaggattgcctgagcctgcaatggcgaggccacagtgacctgtgatggcatcactgcactccagccagggcaacagagtgagaccctgtctcaaagataaataaacaactatttcaaaaattgatatataatccacacaccctaaaactcgccctttgaagtgtacgattcattggtttttaatacattcacaaggttgggcaaatactaccttcatctaatttcaggacattttctgttttttgagacagaatctccttctgttgcccaggctggagtgcagtggtgcgatctcggctcactgcaaacttcctttgcccctggggagcttaagtgggtggtgggacaggcagcgagacccattagagaacacaagaggccaaggcttgagatagagtggagggggccggagaatactagtcagaagttgctgctaggggccgggctcagtagctcacgcttgtaatcccaacactttgggaggctgggcagggcggatcacttgaggtcaggagttcaagaccagcctggccaacatggtgaaaccctgtctctactaaaaatacaaaaaaattagccaggcgtggtggtgagcgcctgtaatcccagctactagggaggctgaggcaggagaatcactcgaacccaggaggtggaggttgcagtgagccaagatcatgccattgtactccagcctgggtgacagagcaacactccatctcaaaacaaaaaacagaagccatacctatgcatgcccaagaggagaaatcaaggcaggcttcctgaaggaggtgtcattagcttccaaaagcaggtgaggctagggaaatcattcgaagcaggtaggcccatgaagcagaggtgtagagagtggcatcgggactccaagtaccctaggccaccccccagtcccctcatgggtacctctggcttgggcggctccttctcggggccctggagctgcttctggttccagctgagccacatctggtgcagcttctcctggccttccaccagcttctgatcaacgccttgcttgacagtttccatctggggcaggggagagagaagtgagggaaggaggctcccctgggagagacgggattccagaaggaacccaaggaatccttccagcatctgacttacatgacagtctagaaaagagaaagggagggagggaggaagggtttcctggctacggtgagctctggggcctttggtttaatcattgacatactcaggctctgtgtggttggtgcaaagaagggctgcacatcccctgtagctcttcccattgtgtcaatttctcctgcgcttgcaagggagcctggacacgtggctggctttggccaatgggacatgagcagatggaaccagcaaaggcttaaaaagtgcttgtaggctgggcatggtggctcacacctgtaatcccagcactttgggaggttg[134 bp omitted]gaggcacgagaatcgcttgaacctgggaggcggaggttgcagtgagctgagattgcgccactgcactccagcctgggtgacagagccagactctatctcaaaacaacaaaaaacaaaaaacaaaaaaaagtgcttgtaatgaaatatgactcagccttccaaaggaacgaagcaggctgacttctgcaatcccagcgctttgggaggccaagggggttggatcagttgagctcagtagctccagaacagcataggcaacacagtgacatctcatctctacatattac[148 bp omitted]aaaatacaaaaaattagcccagcgtggtggtgggcgcctgtagtcccagctactcgggaggctgaggcaagagaatggtgtgaaccaaggaggcagagcttgcagtgagcagagactgcatgccactgcactccagcctgggtgacagagcgagactccgtctcaaaaaaaaaaaaaaaaaggccgggcgcggtggctcacgcctgtaattccagcactttgggaggccgaggcgggcggatcaagaggtcaggagatcaagaccatcctggctaacactgtgaaaccccatctctactaaaaatagaaaagaaaattagccaggcatggtggccggcgcctgtagtcccagctaccagaaggctgaggcaggagaatggcatgaacccaggaggcggagcttgcagtgagctgagatcgcgccacaaaaagaaaagaaaaataaataaagaggaatgatggcagacatatgctccaagatgggtgcacctaagaggctgcagtgagccatgatcatccactccagcctgggcaacagagtgagcccctgtctctggaaaaaaaaaaaaaaaaatcgtcataaaggtaaatgaagctatccattagggtgggctccaatccataaagggctggtctccttcaataaggagattagagctgtgcgtggtggctcgtgtctgtaatcccagcactttgggaggctgaggtgggtggatcacttgaggtcaggagtttgagaccagcccggccaacatagtgaaaccccatctctactaaaaatacaaaaattagccaggcatggtggcaagtgcctgtgatcccagctactcgggacgtggaggcccaagaatcacttgaacccgggaagtggaggttgcagtgatctgagattgcaccactacactcccgcctgggcaacagagcgagactccgttcaaagaaaaaaaagagattaggacacagacatacacagagggaagggacgaccacgtgaatacacagagagaagatggctgtctacgagtcaaggagagaggccccagaaggacactctgatcttggacttccagcctccagaaatgtgagaaaataaatatctgttgtttacatttcccagacagtacgaattttttttttttttttttgagatggagtctcactcttgtcacccaggctggagagcagtagcatgatctcggctcactgcaatctctgccgcccgggttcaagcgattctcctgcctcagcctcctgagtagctgggattacaggtgcctgccattgtacctggctaatttttgtatttttagtagagatggggtttcaccatgttggccaggctggtcttgaactcctgacctcgtgatccacccgcctcagcctcccaaagtgctgggattacaggcatgagccaccgcacctggccacgattttttttttttttttgagatggggtcttgctctgttgactaggctgcagtgcagtggcacaatcatagctcactgcagcctccaactcctgggctcaagcaatcgtcccacctcagcctcccaagtagctgagattacaggcacgcaccaccacagccagctaattgttttaaattattttttgtagagatggggtcttgctatattgcccaggtgggtctcaaacccctggactcatgcgatcctcctgccttgggctcccaaagcacttgagggactcacacaaagaggtgtgagccactgtgcccggccccagacagtgtggtttgtggcagcatcctgagcaaatgagtgtacaaccagatacagtgccaggagcaagcgggaatggccctgccagcctgcagaggggtgagcaataagccactgagctctgggtgggtgtctgctgcggggtgaaggctgctggctcagggccccgaccccctggaacctcaccaggcttaggacctgcgacagctgcagcagagcctcctgtgccctctgcttggtggctcgaagcttgcccagcgagtgctcataggcgtgctgccgcagcctctccgacagggagcccagacgtacgaagtagctctgttcctgccgctgctgctgcacggacgcgacgtcaaagccatccagggatgtggcgatgcgggctgcaaggaaaaggagaagggtctctgtgaagaccagaacacacagctgggctcgtcccatgcagacagtcccaagaatcacactgtccagtttatttatttatttatttagagatggagtctcgctctgtcgcccaggttggagtgcagtggtgtcatctcggctcactgcaacctctgcctcccgggttcaagtgattatcctgcctc[134 bp omitted]tggcctccaaaagtgctgtgattataggcgtgagccaccacacctggccatgctgtccagtttataacccagttctacttcttataaacctcgaaggcctgggagcaaaggattctgccttggttttccctatctgcaaaacggggataaggaaaattaaacctcacaggaatcagagaccttagactagcaggagggtctcaagctatggcctgcaggccagacctgccttggacaacctgtgaatataggcctgaatgttcattatgcagtcctgcagagaataacagcattccagccagcaatacatcacatatactacagaggtcccataagattataataccgtaggccgggtgcagtggctcatgccagtaatgccagccctttgggaggccaaggcgggcagatcacttgaggtcaggagttcaagactagcctggccaacatggcactaccccatctctactaaaaatacaaaaattagccaggcgtgatggcactagcctgtaatctcagctacttaggaggctgaggcaggagaatcgcttgaacccgggaggtggaggctgcagtgagccaagatcacaccactgcactccagcctgggtgagagtgagactccgtctcaaaaaaaaaagagaataatgacatttcagccaacaatggactgcatatactacagtggtcccataagattataataccatatataccgtatttttcctgtactttttcttcttttttttagacagggtctcggtctgttgcccaggctggagtacagtggcacgacctcagcttactgcaggctcaacctcccagcttcaagctatccttcaaccttggcctcccgagtagctgggactacataaagctgggactacggcaagacacctggctaatttttgtactttttgtaggaatggggtctcactatgttgcccaggctggtcttgaaatcctggactcaagcaatctgctcgcctcagactcccaaagtgctaggtttacaggtgtgagccattgcacctggcttcctgtaccttttctatgtttagatctgtttgttttgtcggtttttatattttgaagtacagtctcgctctgttgcccaggctggagtgcagcggtgcaatcatagctcactgtagccttgaactcccaggctcaagtgatcctcctgtctcagctcccaaatagcaactgggactacaggcgtgcactagcacacccagctaatttttaaattttttgtagagatggggtctatgttgtccaggctggtctggaactactgggcttaactaatcctcccaccaaagtgctgggatgacaggtgtgagccaccacgcctggcctcatcccatgttcgtaggttcatatgtgtatatgcatgtatttatttacttatttatttatttatttatttttttgagacagagtctcactctgttgcccaggctggagtgcaatggcatgatctcggctcactgcaacctccgcctcccgggttcaagtgattctcctgccttagcctcctgagtagctgggattacaggaatgtgccaccatgcttggctaatttttgtatttttagtagagatggggtttcaccatgttggccaggctggtctcaaactcctgaccatgtgatccagctgcctcagcctccgaaagtgctgggattacaggcatgagtcaccacacctggcctttattttttttgagatggagtttcactcttgttgcctgggctggagtgcaatggcgcagtcttggctcaccacaagctctgcctcccagattcaagccattctcttgcctcagcctcccgagttagctgggattacagggatgcgccaccatgcctggctaattttgtatttttagtagagatagggtttctttatgttggtcaggcttgtctcgaactcccgacctcaacctccacccgcctcagcctcccaaagtactgggattacagccatgagccactgcgcccagctgcatgtatttatttaatcctgctcctactgtacccatgcttttttttttttgagatggagtctcactctgtcgcccaggctggagtgcagcggcccaatcttggctcactgcaacctctgcctcccaagtagctgggattacagacgcctgccaccgcacctggctaatgtttattttattattattatttttttgagacggcgtctagctctattgcccaggctggagtggagtggcatgatctcggctcactgcaagctccgcctcccaggttcatgccattctcctgcctcagtctcccgagtagctgggactacaggcacccgccaccacgcccggctaattttttttttttttttttttttttttttagtagagatggggtttcactg[132 bp omitted]ccatgttggccaggcttgtctcaaactcttgacttcaggtgatctgcccacctcggcccaccaaagtgctgggattacaggctgagccaccgcgccctgcctatatcctaagctacttatttgcaaaaatcccaatccccgcactttggggggctaaagcagtaggatcactccagccaaggagttctggatcagctgggatgacagagggagaccccgtctttaccaaaaattaaataaagaaaaattagttgggcgtgatggtgtgtgcttgtagtcccagctactcggaggctgagatgggaggctcgcctcaacccaggagttggaggctgcattgagctatgatcgcaccactgcacttcagcctgggcaagagagtgagactctatctctaaaacaaataaataaaaaagggccgggcatggtggctcacacctgtaatcccagtacttggggaggccgaggtgggcagatcacaaggtcaggagttcgagaccagcctggccaacatagtgaaaccccgtttctactaaaaatacaaaaaattagctgtgtggtggcaggtgcctgtaatcccagctactcaggaggatgaggcaggagactcgcttgaacccaggaggcagaggttgcagtgagctgagatcacgccattgcactccagcctaggtgacagggcgagactctgtctctaaataaataaataaattaattaaagaagaatatcaaataaacagtgcagggagtgcgaatatgtgaccgagatgactggagtgggatgtctggcctggcgggaacaccagcattgttgtcacagttcagtgagatctcaagtttagtcacgtatttatgcaggagcggagtggcgaagggggaagaggaggagggcggggagaggacaggggaggttgtgcaggaccttgtgggctgtgacgaggacttgggctttgaccccaggggaggtggggtccatggagggctgtgggcagagggacgggttctgactcaggtggtcacaggcgccctctggtggctgctgtggggaggagactgtggtggatgagggcgggagctggtgagcaggacagaggggactgcgttagtgatgagattccaagatgcccgggagaagtggcagggacgaggcggcagtgagtgtcggcacagaccccaggaggccgacagcggcttccggtcagggggcctggggaggggtcccagagcagcccgctggccacacttacccagttcggcatccgtaaggggcaggtggttgtccgcccactcctccgacttccccagcaccgtgtcgaccccactcaacaccatctggcccaagcgggagcccatgaccgattggacgccgccggtcactacggactttgtcttgtccacgccgctctgcacagcaccgcgggtcgcgtccaccgcctccgacaattgggtggccaccgtgtccttggcgctagacaccatctcttgggcccccgacaccttagacgacacaagctccttggtgtccgccaggacctaggagatgcaacagcatcagcatctctgccttccctccatatctgggcacccctcccctgcaccccaacttccagggagaccgaggcggggagcgccatcccccgggtgaccccagcatctccgtcttccctctgtatgtgggcacccctcccctgcaccccaacttccagggagactgaggcagggagcgccatcccccaggtgaccctgagtctggagttgtgggcatgacctcatactctgcagccagactacctaggctccgttcctagctagctacttctcagctgtgtggcttcaggaaagtcactctacctccctgtacctcatttctttctttcttttttttttttggagacagggtcttgctctcttgcccaggctggagtgcagtgacaccatctcagatcactgcaacctctgtctcccgggttcaagcagttctcctgcctcagcctccgaagcagctgggattacaggtgcccgccaccatgcctggctaattgttttttgttgttgctgttgttgagatggagtttcactctcgttgcccaggctggagtgcaattgtgtgatctcggctcactgtaacctccgcctcctgggttcaagcgattctcctgcctcagcctcccgagtagctgggattacaggcatgcgccaccacgccaggctaattttgtatttttagtagagatggggtttcaccatgttggtcaggctggtctcaaactcctgacctagtgatccgcccacctcagcctcccaaagtgctaggattacaggcatgagccactgcactctgcctgttttttgtttttttttttcaatttaattttttttcttttgagatggagtctccctctgtcacccaggtggagtgcggtggcacaatctcggctcactacaaactccacctcctgggctcaagtgagcctcccacctcagcttccccagcgagtagctgtgaccacaggcacgtaccaccactcgtggctattttttatcttttatttttatttatttattaatttttttgaggcggagtttcactcttgttgcccaggctagagtgcaatggtgcaatctcgattcactgcaacctctgccacgtgggttcaggtgattctcctgcctcagcctcccaagtagctgggattacaagcacatgccaccatgccgagccgatttttgtatttttagtagagacgggtttcaccatgttggccaggctggtcttgaactcctgacatcaggggatccacttgcctgggcctcccaaagtgctgggattacaagcatgagccactgcgcccagccttattttttattttttgtagagacaaaaaatacaaaaaattagccgggtgcagtggtgcatgtctgtaatccttactactcaagaggctgaggcgggagaatcccttgaacccgggaggtggagtttgcagtgagccgagactgcaccactgcactccaccctgggtgacagagagagactctgtctccaaaaaaaaacaaaaacaaacaaacaaaaaaaagctttgcatggaatcctttgactacgccccacccagcacatggtgagcgctcatctgtcaatacctgctgttctcgaatctaagtcttttttttttttttcttttgagacagggtctcactgtgtcactcaggctggagtgcagtggtgcaatcatagcttactcaagccttgacctcttcggctccagcgatcctcccacctcagcctcccaagtagctgagactacaggtacgcaccaccacacccggcttatttttttattttttgtagagacaaggactctccatgttgcccaggctggtttcgaactcctggcctcaagcagtcctcctgctttggcctcccaaagtgctgggatgaccgacatgagccactgtgtccagctgaagctaagtctttagacagatctctatgcagagggctctccgcaaagttgaaaaccacacctgccccattcctacccaagttggtgcttccctgaagactcagtcctcttgtactcatgagagttcatctttttgtgggggaagagggtgtgagagtcaagttttttgtttttgtttttgtttttttttacagagtttttgctcttgtcacccaggctggagtgcagtggcactatctcggctcaccgcaacctccacctcccaggttcaagcggttctcctgcctc[133 bp omitted]gccccactactcagtgaacacgcacgttctcacactggcccggattaaaatctagctctgacaacaccaccgtcccccagaacctggggaaagttacctcttcacaaagggggaaaaaactcatagggcccagaattgagagagcattgcacctctcaaaaagtcaagagctcacagcaggccaggcacggtggctcacacctgtcatcccggcactttgggaggctgaggtgggaggatcgcttgggcccagaagtgtgagaacagcctgggcaacatagtaagacctcacctctacaaaaaatacaaaaattggccgggcacggtgactcacgcctataatcccagcactttgggaggccaaggcagctggatcacctgaggtcaggagttcgagaccagcctggccaacatggtgaaaccccatctctactaaaaatacaaaaatttgctgggcgtagtgatgggcgcctataatcccagctacttgggaggctgaggcaggaggatcacttgaacccaggaggcagaggttgcagtgggctgagatcacgccactgcattccagcctgggcaacagaacgagactccatctgaaaaaaaaaaaaaaaaaaaaaaaaagctcccagctgctgctctgttcagtgaccttgaagaattcaccctgagcttatcccttctataaacagaaagactgttggcctcctacgctatcagtgggagagaaagggaagcaagggcttggccctgagacgggggctcctggttgacgtttcccatcttcctgtaagctcagcagtttccatcccccctcagccaagcccactattggcctttgctgataaggtgtaggcatggctgggcatagtggctcacaactataatcccagcactttgggaagccaaggcaggcaggaggattgcttgagcccaggagtttgttttttg[147 bp omitted]cccattcctacaaaaaattaaaaaattagtcaggtgtggtggtgcacacctgtagtcccagcttctcaggaggctgagagctgggaggattgcctaagtctaggaggtcaaggctgtagtgagccaagatcacgccactgcactctagcttgggctacagagcaagaccttgtctcaaaaaaaaaaaaaaaatgcaagttgacaaccgctctgctgtttcccagctaaggccatttctgcataaatgggaggtgaggaagtctaaccatgatgggacagcacagctccccggcatacagtaggcactcaatagcaagtggatgaataagctgcctgtccctgcaggtggtctcagggaaagtccaaggatgctgggatgcggctggcttgtcctgcctccaacccagggatcacctatttctgatgctacagacccagacacaagcaggtggtacccgagggtggcccttctgtaaccactgggctgaagcggacatgg[132 bp omitted]gaaaccccatctctactaaaaagataaaattacccaggcatggtggtgcatgcctgtaatcccagctactcgggaggctgaggcaggagaatcgcttgagcccgagaggcggaggttgcagtgagccgagatcgcaccattgcactccagcctgggcaacaagagcaacactctgtctcaaaaaactaaaaaaataagcatctaccctgtgccaggctgcctgctgggcactggacacagccacaaagcaggcagcctgtgccctggtcccagctggggagacaaacaataaccgattaagcctcacacttatctgaaggagggtgtttttttttttttttttgagacagagccttgctctgttgcccaggctggagcgtggtggcacgatctcggctcactgcaacctcttgcctcccaggttcaagtgatactcgtgcctcagcctcccgagtagctgagattataggaactcaccatcacgcctggctgatttttgaatttttagtagacacagggtttcaccatgttggccaggctggtctcgtactcctgatctcaagtgatctgcacgcttcggcctcccaaagtgctgggagtaaggcgtgagccaccacgcctggtctgtgcctcattttttcatcccaggctgttataggttgaattatggccccctcaaccccaaattcttatgttgaagtcctgatccccaggggtaagaatgtggctgtatttagagacagggtctttaaaaagcggtgattaagggaaactgaggtagggcacagtggcacactcctataattctagcactttgtggggctgaggcaggaggattgcttgagcccaagagttggagaccggcctgggcaatatggcgagactccgtcttgacaaaaagtacaaaaattagccaggcgtggtggatgcacctagtcccagctactcaggaggctgaggcaggaggatctgttgagcccaggagtctgagaacagcctgggcaacatggtgaaaactcgtctctacaaaaaattaaaaatagccaggcatggtggtgcatgcctgtggtcccagctacttgggaagctgagatgggaggatcacttgagcccaggagttcaaggctgcagttgagccatgatcacactactgcaccccaccctgggtgacagagtgagaacctgtctcaaaaaaaaaatttttttttttaatgttaagagccaacatttgctacaagccatgtgctgttctgggccttcaggtgttaaccccaggtcagcattgccattctgtagaaaagaaagtgggacccaggctgggcctggtggctcatgtctgtaatcccaacactttgggaggccaaggcaggtggatcacctgaggtcgggagctcgagaccagcctgaccaacatggtaaaaccccatctctactaaaaatacaaaaattggccaggtgtggtggcacatgtctgtaatcccagccactcgggaggctgaggcgggagaatcgcttgaacctgggaggtggaggttgcagtgagctgaaactgcaccagtgcactccagcctgggcaacaagag[211 bp omitted]gaggcaggagaatcgctggaacccggaggtggaggttgcagtgagccgagattgcaccactgcacaccagcctggcaacagagcaagaccccgtctcaaaaaaaaaaaaaaaaaaaaaaaagtgaggcccacagaggcaaagtaacttgtgtgagggccacccagct[141 bp omitted]attctcttgcctcagcctcccgagtaactaggactacaggcacacgccaccacgccaagctaatttttttttttgtagttttagtagagatggggtttcactgtgtttgccaggatggtctcgatctcctgaccttgtgatccgcccacctcagcctcccaaagtactgggattacaggcatgagccaccgcgcctggccagaatatggtgtttttttggtttttttttttttttttgagatggagtttcactcttgctgcccaggctagagtgcaatggcatgatctcggatcactgcaacctccgcctccagggttcaagaaattctcctgcctcagcctcccgagtagctgggattacaggcacccgctaccacacccagataaattttgtatttttagtagagacggggtttctccatgttggtcaggctggtctcaaactcccaacctcaggtgatcctcccgccttggcctcccaaagtgctgggattacaggcatgagccaccgcgcccggccaggaacatggtgttttgatgttttgactttcctgccgccaaccttttctgactaataagttatggaggtggcaacattctgtgtaaagggccacgtaactaagattttcagtactgtgggtcacagtctctgtcacaactactcaaccttgccattgtagggtgaaagcagtcatagacaatatgtaaataaatgggcatggctgtgtgccaataaaactttattataaaaacaagtgggctgggcaccgtggctcattcctataatcccagcactttgagaggctgaggcagctggatcacctgaggtcaggagttcgagaccagcccggccaacatggtgaaaccccatctctactaaaaatacaaaaactagatgggcatggttgcaggcgcctgtaatctggctggctttgcaattattcctccagctaccctgtggggagtggattcggggtggggatgggaaccgacaggagaggcagcagggaggatgccatcaagcttgtctagttaagctgggaccagcgcactccacacccaggtaggtccctgtctcgacagagcccctgaggacggacatcgttaccttctccgtgggctgctgcaggatggggaggttctcctccaacttgtccagccccctgtgggcgtattcgctggctgatgcaactgccaacaacaattaagacgcaaatgtgactgctggaaggtcacctagtaatggttcagggggacaggaccaagagctgggtagacccccctactccccacccagggaaatgaccaggaggggaattcagtgccccctgggacttcacccactctggggctccagcttggagaggatcggctgagccccgctgacagcagccgccgtgagggtcctcactcccttctctgctgcgtcgcagacagtcttgatgtgcgggtagctctccttggtggaggcataggctgcggacaccatgtcgcaggtggagctgatcagaggcatgctggccacacggtccaccacactgggctacaggagagaagtggctcaggcaaactgggtgggggaagatggggagctcagccggaaactcagggtgccctgcagttttgctcttactcctggccagtgaaacggctcagtttacccacactttgcatccaggcagttgcacaagccaggaaccttggggtttcgccacgtgcttcctttatttttattttatttttgaaacggagtcttgcactgttgcccgggctggagtgcactgatgcgatctcagctcactgcaacctccacctcccaggttcaaacgattctcctgcctcatcctcctgagtagctgggattacgggtgccaccacgcccagctaatttttttgtatttttagtagagatggggtttcacca[141 bp omitted]tatcccagcgatgtgccaggtggtgataagggacaacagttccattctcatggcagttagggtctaaaccgggggctgtagaccacagcccatgggtcacagccagcgcaccacttgatttttaaattttaattatttttggggccaggagcagtggctcacgcctgtaatccgagcactttgggagaccgaggcgggtgggtcactttgggtcaggagtttgagactagcctggccaacatggtgaaactccgtctctactaaaaatacaaaaattagccgggcgtggtggcacatgcctgttaccccagctacttgggaggctgaggcaggagaattgcttgaacccaggaggcagaggttgcagtgagccaagatgtcaccactgcactccaggctgggcgacacagcaaggttccatctcaaaaatatatacataaaataaaatcacctgaggatgagagatctggaatagaaactggcctcctaggacgtccctgagagagccttcagaggtgaggatgatttggctcaggggttggggagggcaggtagtttcagacagaaccctgctccctcaggccctccaagggcctttgagattcccccctcccaactggggacaccagtgagtggtccataccccactgaggaataaatccctctggctccgtgagctgccggcagatccctggctccctgccagggcaccctggggtgggaagcctccttgcacgggaatcacagggtcggggcagtccctggtcccggcccttcctcacctgctgtaccggttcttccactgtcacctgggtgctgccatcagcctctgccccgtcggcagacatggtctctgcagcagacgctgaggagagaggaacagtcaggtacagcctgcctggccccaccttccaggagaaagtccaggcccacgctgcagctggaagacagggttcacacctgcccatgacttacagctgtgtctttcagtccttagcaggcacaagagtgacctctggactttgttcaatagcaagtgctgattctaaagcttcgggatggggctcacctggccccctatttctttttttttttctttattttctttggagacagtctcactctgtcgcccaggatggagtgcagtggggcaacctgggctcactgcaacctccgcctcctggtttcaagcaattctcctgcct[134 bp omitted]gcctcccaaagtgctgggattacaggtgtgagccaccacacctgatcctttcttttttttttttctcattaaagacagggtcttgctctgtcacccaggctggagtacagtggtacaatcacagctcactgcagcctctaactcctgggcttaagggatcctcctgcctcagcttcccaagtaactaggactataggcacacaccaccacgcctacttaattttttctttttgggtagagatgttatcttttttttttttttttgagacagagtcttgctctgtcgccaggctggagtgcagtggcacgatctcggctcactgtaacctccacctcccacgttcaagcaattcccctgcctcagccttcccagtagctgggactacaggcgtgtgccactacacctggccaattttttgtatttttttagtagaaacggg[131 bp omitted]gctggtctcgaattcctggtctcaaacaatcctcttgccttggactcccaaagttctgggattacaggagtgagccaccatgcccggccctgaccctgcatttctaaaaggctcccaggcagtgttgatgcagctggtccctgggacacacgtcaggaagcaaggcttgggaacagtcccttcagggctcacctgtactccagcaagccaggtatgacctaaaacctctgtagaggacaatttgccaatagctgtcaagttccaagagccatcttccccttgacccagaaacctcacttcggggaagaacccacacctgtgtttccacatgagcagagctgtgtggacttactggccacaacatgacactggaaacaacct[141 bp omitted]aaaccccgtctctactaaaaatacaaacattagccaggcatgatggtgggcgcctgtaatcccagctactcaggaggctgaggcaggagaatcgcttgaacccaggaggcggaggttgcagtgaggtgagatcgcgccactgcactccagcctgggcaacagagtgagactccgtctcaaaacacaaaaaca[143 bp omitted]atggagaaaccccatctctactaaaaatataaaattagccaggcatggtggcgaatgcctgtaatcccagctattcaggaggctgaggcaggagagttacttgaacccgggaagcggaagttgcagtgagccgagatcgcgccgctgcactccagcctgggcaacaggagcgaaactctgtctcaaaaaaaaaaaaaaaagagatttaaatgtaactcacatgggccagatgtggtgggtcacacctctaatcccagcactttgggaggccgaggcaggaggatcacctgaggtcaggaggtggagaccagcctggccaacatggcaaaaccccgtctctactaaaaatacaaaaattagccaggcgtggtggtgcacgcctccatgtttagttatcccagctactcaggaggctgaggcaggagaatcgcttgaacccaggaggtggaggttgcagtgacctggtattgcaccactgcactccagcctgggtgacagagcgagactccatctcaaaaaaaaaaaaaagaaaacaaaacaaaacaaacaaaagactaaatgtaactgacatgacatgaacaaagatctagtcaagggataaaatgtgttaaatagggcaaactttcttctctttcttgagacggatttccgctctgtcgcccaggctgcagtgtagtggtgcgatcttggctcactgcaacctctgtctcctacgctcaagcaattctcccaccttgaccctgcaagtagctgggactacaggcacgcaccaccacacctggctagtgtgtgtgtgtgtgtgtgtgtgtgtgtgtgtgtgtgtgtgtgtgtgtgtgtggttttgttttttttttttggacagggagtcttgctctgtcatccaggctggggtgcagtggcgtgatttcggctcactgtaacctccgccttctgggttcaagcgattctcctgcctcagcctcctgagtagctgggattacaggtgtgcaccacgtctggctaattttttgtatttttagtagagatggggtttcactatgttggtcaggctggtcttgaacacctgacctcgtgatccacccgcctcagcctcccaaagtgctgggattacaggatgagtcactgcactcagccgtggtttgtttttttttttgttgttgttgttgttttgtttgtttgttttttagtagatggggttttgccatgttgcccaggttggtcttgaactcctgagctcaagggatctgcccaccttggcctcccaaactgctaggattacagctgtgagccaccgcacccagccaaaatttaggctttttttaaaaagtgagataacatgcctgcctgcaccgcagagctatgaagtccaggtcaggggtgtggggaggacggggttccccaggtgagtctatgtaagcgggatgaagccacaactcccttttcctggactagtgaaatgaagctgggacaccatcatcagaagagattctcagggggaagccaggagtcccagctccacctacgctatgctccctggagcaaggcgccttcccctcctctggcctcggtcatcttacctgtaatatgaggctaaagggtcgggcatggtggctcacacctgtaatcccagcacgctgggaggctgaggtgggtggatcatgaggtcaggagttcaagagcagcctggccaacatactgaaacactgtctctactaaaaatacaaaaattaggtgcgggtgtggtggcgggcgcctgtagtcccagctacttgggagactgaggcaggggaattgcttcaacctgggaggcggaggttgcagtaagccaagactgcgccactacactccagcctgggt[133 bp omitted]catggtgaaaccccatctctactaaaaatacaaaaattagccgtgtattttggctgacacctgtagtcccagctacacaggaggctgaggcaggagaattgcttgaacctgggaggtggaggttgcagtgagtcgagatcgcaccactgcactccagcccgggtgacagagggagactccgtttcaaaaaaaaaaaaacatggggctaaaggtcatgcctgtcttatgggctgctttcctggggaattctggtgtgagcctaagaacctgtggccttgagtctgagcatcttttcccagaggaatgaggccccacctcctggtggccttgcttcgatgtcccctaagcagaacccagcaaaatgatgatgttttgcaagcactagatctggagtccagattgggttctttccatttttttttttttgtttttttttttgagacggagtctcgccctgtcgcccacgctggagtgcagtggcgcgatctcagctcactgcaagctctgcctccccggttcacgccattctcctgcctcagcctcccgagtagctgggaccacaggcgcccgccaccacgcctggctaattgtttgtatttttagtagagatgggatttcaccatgttagccaggatcgtctcgatctcctgacctcatgatccgcccgcctcggcctccgaaaatgctgggattacaggcgtgagccaccatgcccggcctttttttttttttgagacagagtcttgctctgtcgcccaggctggaatgcagtggcgtgatctcagttcagtgtaacctccatctcccaggttcaagcgattctcctgcctcagcctccagagtatctgggaatacaggtgcccgccaccacgtccggctaatttttatatttttagtagaggtggggtttcaccatgttggccaggctgttctccaactcctgacctcaaatgatccgcccacctcagcctcccaaagtgctgggattataggcgtgagtcatcctgcccagcccagaatgggttctaatcccagcttggcaactcactaggaataggagtttgggaaggcagcatcccctaggagtcttgcttgccacatctgtgaaatgtgtataagtgtttcacaagagcctggagtccctgtggactggaggagacgctgctccggggaagctcagatccgtgcccggcacatagtaagtgctccataaactatctcaccgcactctggcttccacggacaaaggggtaaagccagccaggaaccagcttcctgctaggtacaaaagtcccccaactgggaagtcaggtgagaagacatacctacctcccagtgatcattgcctaaatctgtgcttctcctcacctcctttggagcctgagctcacctgggcagggggccaggtaggcaggcatcaaactcctggcctcgaccgattctcaagtcccacttaggactcaggcagcttcctcccgtcccctctgtccaccatgacttcctggaactggtttaagcaagggtggccatggcagatgtcaacaccctatgaaacccctgggggtcagtgacctgccttgccgctggctccagaaggggagctccaggccagacccagccatccagcaacttcagagcatgctaagactggacttccaaaattccaagggccccaggtcccactgccaggcctagccgggacaagaaccccaaagcagttaacggataggccttcctacttttaagccacctcgtcgccacgcccacccgagggaagtgggcaggctttgcccaagacctccccagaatcagttgggggcgccaggagctggggcaacccccacccccacccgtggcaaaaccatctgtaggggagggggctttgcggtggcggggggtgtctctgaaaaccccagaagggagggcggagattctgcccgcaggaggaaacttgcctgcaaatggcgtttccaaaagcaaactgttcaaaatttagagaaaacctggtgggcggggggcggtatttagcccacccccttcaatatcaccccttctacggggctctttcgcccctcaaaagtcccaggaagtgagaagagggtttcaaagtctgagcttcgttgcagaagttggatttttctggggggaggggtgaccagcctgggctgaagacccctccccaggccgcagagtccagcaaatcccaccccgagaaaggccctccccgacccctccggcccctggggtgccccaggactccatggacaccgccccccagctcaactgagacgcccccgccactcaccgcggtcaaccggacgtcccaggaacagctgccgcgacttcaaaaccagcttggaaaccgtccgggccgaggcgggggtggcttttactgcgtggtaggttgggggcgcactggagtgacgggcgaggggaccaatcaggttgagggattgcccgcgccaggcccgcccctctcctccctgccccgcctccactaggccccgcccctcgccaagtcatgaagtccgggaaggactccacgccctgcccctgaaggggagggagcactcttggaccacgcctgtcccagccacgggacccccgctccgcagctggggaccctgtgaagttggccctgggaggtgagtgcgatcgggggcgccgcacaggtgctgggattccccaggtcgcccatttcccctatggccaaactgaggctgcgagaaccctgggagagttgcagggtgaccctcgccagcgcgtcaggggccacgccctccaccatgggctccgactcagctatatgtacacacacacacacacacacacacacacactttttttttttttttgagacacagtctcgctctgtcgctaaggctggagtgcagtgacgcgaccttggctcactgcagcctccacctcctggattcaagcgattctcctgcctcagcctcctgagtagctgggattacagacacgtgccaccacgcccggctaattttttgtatttttagcagagacggggtttcaccatgttggtcttgaactcctgacctcaagtgatctgcccgcttgggcctcccaaattgctgggatcacaggtatgagccaccgcacccggcccaacccagctatatgagtgacttgaaccaccacgggaacttgtccagcctccggcctgatctgcccaacatcagaccacttcatcctcccagcactgtattgtctttttaatcatccctattttgcagagaaggaaactgaggcctggagagggtcagccaggggcaatggaggggtcaggctccaggctctgtgactgctggatcaaccttttcctgaagctgcccccacttggattttaccccgcccctctccacctcccaaattatttatcctcttggtctataaaccaaggtctcaatctcagatggtccagggaggaggtgaatatttctgctgaggaggtggcagtgatgccctgcttagaggggcaggggagagcagtgccctatgggagacccacctggagagtcacagatccacaggaagttcaagctgtagacatgtcctgcctgttagggaacaattggaccaaatgaaacccaactggggctttgtccagcccaggggccaccagtttgccacctctgccaaattatttgaatagaatgaagcttctggtagctttagaaagaacatgggaaaaattgggtgtctgtgactgcatttttttgggggggtgagtggggacagggtctatgctagcactgtccaatagaactttctgcaattctagaattgtgtgccatccaacattgtagccaaaagcaccacgtggctaatgcacagtgagaagctgaatgtttaaattttttttttttttttgaggcagagtctcgctctgtctcccaggctggagtgcaatggcgcgatctcgactcactacaacctccacctcccgggttcaagcggttctcctgcctcagcctcccaagtagctgggattacaggcgcgcgccaccacacccagctaatttttgtatttttagtagagacgaggactaaccatattggccaggctggtctcgaactcctggcctcaagtgatccacctgcctcggcctcctaaagtgctgggattacaggtgtgagctaccgcgcttggcctgaatgtttaaatttaagtaacttcaggcagctagtgagattctcaagtgaatctgagaccccattccatgacatttgtaacaggctttttccttctcattcactcattcaaccatatttattgagtccttgcgctggggacagcggtgagctaaacagataagaattccagccctggtgacacacactacccagtgggagagacgaacaaggaacaacataagtgagagaactttacaatgtgtcacgtggtaggacagcaaaggacgagatgaatgtgggggatgcggggattttgttcttgttttttgtcaaagagtctcactctgtcacccaggctggagtgcagtggcacgatctcggctcactgcaacctccgcctcccaggttcaagaaattcttgttcctcgacctcccaagtggctgggattacaggcctgtgccaccatgcctggccaatttttgtattttttttttttttagtagagacggggcttcaccatgttggccaggctggtctcgaactcctgacctcatgtgatccaccagccctggcctctcaaggtgctgggttataggcatgagccaccacacccggtggggccgcagtttttagtagggaggtcagaggaggcctttctgagtgacatccaagaagagaagagagagaggccaggagggaaccatgtccagttagggggaacagcattccaggcagcaggcacagtccgtgcaaaggccctgaggcaggaccacaccctgcctgttagaacagtgaggaggccccagtggctggagtacagtgagtgagagagagggaggaggggagggctgggatggctcagagaggggaagtgactcatccaagattcaaggtcagtgggagatttgcctgttaacccttaacttcttagtggccttgagtaacaaaatagctctggtctaggggatgagccctggtgattttgccccacaccgttttttgttgttttttttttttgagacagagtcatctcccaggcttttggttcttcttgatggcaacatctgcccaggagtccccgcctggcctcccacagccctagggtgagaggtaagaaatagctactgttggctgggcgcagtggctcacgcctataatcccagcactttgggaggccgaggtgggcggatcacctgaggtcgggagtttgagaccagcctgaccaacatggagaaaccccgtccctactaaaaatacaaaattagccaggtgcggtggcgcatgcctgtaatcccagctagtcaggaggctgaggcaggagaatcacttgaacctgggaggcagatgttgcagtgagccagattgtgccattgcactccagcctgggcaacaagagtgaaactctgtttcaaaaaaaaaaaaaaagaaaagaaaagaaaaaaagaaatagctactgttggccggtggctcacaccggtaatcccagcactttgggaagccaaggcggacagatcacttgagctcaggagttcaagaccagcctggccaatatggcaaaatcctgtctctaccaaaaatacaaaattaaccgggtatggtgacgcatgcctgtaatcccagcttctccacaggctgaggtggaaggatcgcttgagactggaggggtggaggttgcagtgagccaagattgcaccactgcactgcagcctgggtagcagagcaagaccctgtctcaaaaccaaaaatgagatagctgctgttttctgggctatttcattacattattcagcagcctgattcccattttcttttattatttatttatttatttattttcgagatggagttctgctctgtcgcccaggctagagtgtagccgtacgatctcggctcactgcaacctctgcctcccggtttccagcaattctctgcctcagcctcccaagtagctgggattacaggagcccaccaccacgcctggctaattttttgaatttttagtagagatggggtttcaccatgttggccaggctgatcttgaactcctgacctcgagatccacccgcctctgcctcccaaagtgttgggattacaggcgtgagccacagcacgtggcgctatttatttatttacttcttcttattattattatttgagtcggagtcttgctctgtcacccaggctggagtgcagtggcgcgatctcagcttactgaaagctccgcctcccgggttcacgccattctcctgcctcagcctcccgagtagctgggactacaggcgcgtgccaccacacccagctaatttttgtatttttagtagagatgaggtttctccatgttgaccaggctgctctcaaactcctgacctaaagtgatccgcccacctcagcctgccaaggtaaaccaactgtgatttctgttttctggatcaggaaactaaggatcagagaggcagagtaacttgccccaggtcacacagccagaaattgccagccccagggtttgaaccttgagttatgtgtctttaaggtctttggtttctgtttgttttggggtttttttgttttgttttgtttttgagagagtctcacttcgtctggaagtgaggctggagtgcagcggtgggatctcagctcactgcaacctccgctttccaggttcaagcaattctcctgcctcagcctcctgagtagctgggattacaggtatgcgccaccacacccggctaatttttgtatttttagtacagacagggttttgccatgtgggccaggctggtctcgaactcctgacctcaggtgatccacccacctctgcctcccaaagtgctgggattacaggcatgagccactgcgcccagcaggtctttgtttttgacattttctactctttctcttctttccttccctctgcatcccctcccaattctaggactcctaattctttctttttttttttttttttttttttttttttttttga[131 bp omitted]caccaagcccggctaattttttgtatttttagtagagacagggtttcaccatgttaaccaggatggtctcaatttcctgacctcctgatccacccgccttggcccctcaaagtgctcggattacaggtgtgagccaccgcgcccagccaggacgcctagttctttctcactgagaagaggggaacggcggtgagcatgctgccacaaggtggcactgctggtcccagatgggtccctgcctggcacaggtgttccctgtctctcctctgacccttccttccctccatccatccatccgtttttaagcatgtcctattgagtgtgagccaggccagcgattcactggatatgcagtcattcaacaaacaataattaagcacctgctgtgtgccaagcctgtgctgggcagccctggagacagacaca[131 bp omitted]agaaaccctgtctctattaaaaatacaaaattagccaggcatggtggcgcatgcctgtaatcccagctagttgggaggctgaggcaggagaatcgcttgaacccgggatggtgaggtgagaattgcttgaatcctctctgagccatccctgtcctcccctcctccctccctctcgctcactctttgcactccagcctgagcgacaaaaacgaaactctgtctcaaaaaaaaaaaaaaagacttttgcggccaggcacggtggctcagctctttgggaggttgaggccagaggatcactggaggccaggagttcgagaccagccaggccacatagcaagaccccgtctctgcacaaacttaaaaaatgtagccaggcatgatggtgcctgcctggggcatcggctacttcgaaggttgaggagggaggattgcttgagcccaagagttctagtctgcagtgagctgtgatagcaccactgcactccagtctgggcgacagagcaagaccctgactcaaaacaaaaaacaaacaaacaaaggcttttggggctgggcacagtggctcatgcctataattcccagaagattgggagtctgaggcagaagaattacttgaagccaggaggttctgttttgttttgttttcttttcttttgagatggagtgtgaccaggtggataaaatagagggttatcagggctgtgatagggtgcacaagtgtgatggagcctggggtaggtgctggacctaggtgggtgagagtagttctggaggactttcaggatgaggtgatgtctaagctgagccctgagaagtgaacagcgatcaggcaggtaaaggcaccaaaaagctgtttcaggccaagggaacagagagtgctaagacacagaataagactggagcgtagaatgtggtgggggtggcatcaggggaaaaaagatgaagctggacagagtggccagggtcaggctgccagatctaagggcactggggagccacagtaggttccagagcaggagcagcaagggcaagttggaacatttgaaagatctcttgggccaccctgtggataatgattcaaagggaataagactggaggatgaggaatgggaggaggaaaggaaccaaatgcttcaggtaactctggaagaaaaagtaggacatacgtggtggcaaggccagatatggtggctcacgcctgcaatcccagcactttgagaggcggaggtgggaggatcgcttgagcccaggagttcgagaccaacctgggcaacatagtgagaccctgtctctgttttgtttgttcgttttagagaaagaaaataaaaagaaaggtggtattggagagggaacagtacagaaggacgttccagtcacagtagcattcattcattcattcggggaatatttatttttatttttatttatttatttttttgagacggagtctcactctgtcacccatgctggagttggagtgcagtggtgcgatctcggctcactgcaagctccgcctcctgggttcacgccattctcctgcctcagcctccagagtagctgggactacaggcgcccaccaccatgcccagctaattttttttttttttttttaatagagacggggtttcaccgtgttagccaggatggtctcaatctcctgacctcatgatccgcccgccttggcctcccaaagtgctgggattacaggcatgatccaccacgcctggcctatttttattattattattatttattacttttttttttgagatggagtctcgctctgtcgcccaagctggagtgcagtggcgcgatctcagctcactgcaacctccgcctcccgggttcaagggattctcctgcctc[212 bp omitted]aagtctagctctgtcacccaggctggagtacaatggcacgatcttgggtcactgtagcccccgcctcctgggttcaagggattctcctgcctcggcctgctgagcagctggcgttacaggtgcatgtgaccatgcccggctaatttttatattttaaattttttttaagttttgtttatttatttatttgagattgagtctcattccatcacctgagctggagtgcagtggcgctatctcagctcactgcaaccttcacctcctggtttcaaacgattctcctgcctt[134 bp omitted]cggcctcccacagtgctgggattacaggcatgagccaccgcgcctggccagggcctggtctttatcttgggagcaatgggcagcaatgttggattcagagcaggggagggccctcatcaggcctctggggaagggaaggggcctgtgagatgcagggactggcaggggcctgggggctctgggagggccagtgggaggtgacggtccgcagagggtctgcagggggtgcgggcagaggagagagagactgtagacggaaagtggacaggtgaggctgacacaggcctcgggttgggggttccgggggcagggccaaccttgaggcagggacccagcagagaagcacgttgggggatatggatgaggatgagctcagcttgcctcttccagaacccctggcgtaaggttgcagggttagcaaataaaaatacaggacacctggttaaatgca[180 bp omitted]t[131 bp omitted]cactgcgcccggcctttgtttttcttttgagacagggtcttgctctgctgctcaggctggagtgcagtggtacaatcagggctcactgcagcctcgacatcctggacctaagcgatcctcttacctcagcctcccaagtagctgggagtacaggtgcatgccaccacatcgggctaatttttgtatttttcatacaggtgggggtcccaccatgttgcccaggctggtcttaaactcctgggctcaagtaatcctcccaccttggcctcccaaagtgctgggattactagtgtgagccaccacgcctggccatgtgaataatttttagcgtaagtatgttccaaattattttgagacatacttatgctaaacatttttcatttaatggagttcagtggctcacgcctataatcccggtgctttcggagacagaggcaggaagattgcttgagcccaggaggtcagggctgccgtgaactatgatggcaccactgtactccagcctgggtgacagagcaagaccttgtctcaaaataataataataataataataattcattttggccgggcacagtggctcacacctgtaatctcagcattttgggaggctg[134 bp omitted]gaggcaggagaatcccttgaacctgggaggcagaggttcctgtcagccaagatcgcaccaccgcactccagcctgggtgacagagggagaatctgtctcaaaaaataataataatggccgggtgcgacggctcacacctgtcatcccagtactttgggaggccgaggg[135 bp omitted]gaggcaggagactcacttgaacccaggaggcggaggttgcagtgagccaagatcacgccattgcactccatcctgggcaacaaaagcaaaactccgtctcaaaataaaaacaaaaacaaatactaataataacaacaacaataattcgtttaactgcctgtcttgtaattaacctggcaactcagccagacgttgtccacgttgccccccgccacattgtggctccagcgaccgggtggacacctgaccagctgtggcccaacggtgagaaggcagaggattttgtctggcaattatttgggctcgctgcaggaagccaggggtcttttaacatgcaggccctggcctgtccccacccccaggccctcatggcgccagctgcccgctgccccctgcaaggcgctggcgggcgtgggggaggggagcagctctgagacccactgtcccctctcctaggccaggagtgtcctactggctcgcatgcccatccgtggaatgcccgaggggaccccgggccaggcctccacctggccattgtctcctgcaccctccgtccctggtggcccgtccggctctgagccagacatttacgacttcttgggcctcccacaagtcctgcaggcaggcagattccttgtccatgtccgggaaggatggaggcctggggcagctgcctgggaatccgatcccacgggcccctgcaactccattccttggggccgcagccacccccacagccaatccctccctggagaaccgtgtccaggatggccaggcctggcggctctgggcacggccctcccagtgccagctgccaggatgtgccagccgcattggcggggagagaacaggccgttcttggctctcccggctgcctctttgttccctgggcggaggtggggggctgttgtcctggcaaccacccccttttccccaacacagtcacacgaggtgaaaactgggggcgcctcaggcctgggggttcaggtcagggagggtccccggtcacctaaggtggccgaggatctccctcctccccgccagcccggcttccttggagttcatatttcccggacgacgagggaggccgggtcaccccccgcacttttggggattggaatgtcggaggtggtggcaacagggggtggacgttcccagcggggcaggcaccgtggtggtggcagctgctagtcccctgcctgtcccacgtcccccaagtgggaggccgcagctggtgtgggtgactttggttcccggggcgggggagggttattttgggagtagggaccagggagaatgagaggcccctccacgggggcaggaagtggggcggccccagctgcattctcccgttggcccacctggcgtggcgggtactgctgccgctgcacaggaagtgtccccaacgcccgcctgtgtggtccactgagtctagggcctggaaatgggaggcagctggcaaggagggggcagggacccgctgggggtgctgtacagcagatcagaatcttccagaagagtcccgctggggtaatggtggtgcctatggagtgagtggtgactttggttcaggccatttatatgcattggctggtttaatccagtgtgttccggaggaagatgctaggaataaatcccccttttacacatggggaaactgaggctcagaaacagaagcgactggcccaaagtcattcagcaaataaacagccgaggccaggcgcggtggctcagacgcctgtaatcccagcacttcaggaggccaaggcgggtgaatcacctgaggtcaggagtgtgagaccagcctggaccacacggtgaaaccctgtctctactaaaaatataaaaatcagccaggtgtggtggcgggtgcctgtaatcccagcacttcaggaggctgaggccggtgaatcacctgaggtcaggggtgtgagaccagcctggacaacacggtgaaaccatgtatctactaaaaatacaaaaatcagccaggtgtggtggcgggtgcctgtaatcccagctacttgggaggccgaggcatgagaattgcttgaacccagggcaggggtggaggttgcggtgagccaagatggcgccactgcattccagccttggcaagacagcaagactctgtcccaaaacaacaacaataacaacaacaacaccaacaacaaaacagcagaggccgggcgccatggctcatgcttataatcccagcactttgggaagctgaggtgggcagatcgtttgagcccaggagcttgaggttgcagtgagctatgatcgcgccactgcactccagcctgagactggagcgtgactccaactcaaaacaaaataataataataataataattaataaacatcagaagtgggattctcatgcatagcatttactatcagatatattaactccacagaggcctccaagtatatactgtacagtgtagctctcaaccaggggtgagtctgtccttcagggcccatggggtgatgtctggggacatttgtggttgtcatgactgggggttgctcctgatatggagggggtgggggccggggatgctgctcagcactcttcagtaccc[145 bp omitted]gaaaccctgtctctactaaaaatataaaaattagccagccgtggtggcacgcgcctgtaatcccagccactcaggagaccgagccaggagaatcgcttgaacctgggagatggaggttgcagtgagccgagatcacacaactgcactccacccttgtcgacagagtgagactctgtctcaaaaatacatacatactatacatacatacatacatacatacatacatacatacatacatacatttcccatcctggggtcgttcatatcagcctaactgtcagagtttaggcaagcagtgagtattcacagtggttcacatcaccggtttggttgaactggttttgagtcctggctctgcagtgagtttgctgtgtgaccttgggcaaatcaatgaacctctctgatcctcagttcctgggcattggtagtggtatcttcctcagggttgctgtctggactacatgagatgatgcaggtaactggcttaagacagtgtcatgctcaaagtgagggcccaagaaatgtgacctagatcactattgttactattcaagccacaaacatttcttcctttttttttttttgagacagagtctcgctttgttgcccaagccggagtgcagaacctctgcctcctgggttcaagccattctcctgcctcagcctcccaagtagctgggattacagacatgtaccaccacacctggctaatttttgtttttgtttttgtttttcaatgtttccagtttctttttttttttattattatactttaaattctagggtacatgtgcacaacgtgcaggtttgttacatatgtatacatgtgccatgttggtgtgctgcacccattaactcgtcatttacattaggtatacctcctaatgctatccctcccccctcccctcaccccacgacaggcccgggtgtgtgatgttcctcttcctgtgtccacgtgttctcattgttcaattcccacctataatttttgtatttttagtagaaacggggtttcaccatgtt[134 bp omitted]ctcacacctgtaatcccagcactttgggaggccaagatgggagcatcacttgaggtcaggagttcaaaaccagcctggacaacacagtgagacccccatctctatttgaaaaaaataaaataaaaaataaaataaaattacatttgtggctctcatgatcactagcattggcttagaggaagaaatagacatgaattgactgaatgtggtggctcttgtctgtaatcacaacagtttgggaggctgaggcaggaggattgcttgatcccatgagttcaagactagcctgggcaacatcgaaagaccacatctctacaagaaacttttctttttttttttgagatggagtctcgctctgtcacccaggctggcatgcagtggcacgatgtcggctcactgcaacctccgcctcccaggttcaagcaattctcctgcctcagcctcccgagtagctgggactacaggtacccaccaccatgcccggctaattttttgtatttttaggagagacgggatttcaccatattggcca[133 bp omitted]tacgcctgtaatcccagcactttgggaggcagaggcggagggattatgaggtcaggagttcgagaccagcctggccaatatggtgaaaccccgtctctacaaaagatacaaaaattagccaggcgtggtggtgggtgcctgtaatcccagctactcaggaggctgaggcaggagaatcacttgaactggggaggcagaggttgcagtgagccaagagcgagccactgcattccaccctgggtgacagagcgagactctgtctcaaaacaaaaaaaaagagagagagagagacatgaatccggtggggcgcaatggcttatgcctgtaatcacagcactttgggaggccgaggtgagcagatcacttgaagtcagaaggttgagaccagcctggccaacatggcgaaaccctgtctctactgaaaatacaaaaattaggcgggcatggtggcatccacctgtaatcccagctactcagaagactgaggcaggagaatcacttgaacccgggaggcggaggttgcagtgagccgagattgcggcactgcactctagcctgggtaacagagcgaaactccatctcaaaaaaaaacaaaaatgcaattgtggctggcggcagtggctcacacctgtaatcccagcactttgggaggctgaagcgggcggatcacttgaggtcaggagtttgagaccagcctggctaatgtggtgaaacgccgtctctaccaaaaaatacaaaaattagccaggcaaggtggcttgcacctgtaatcctagctactagctactagggaggctgaggtgtgaggactggattgcttgaacctggggggcggaggttacagtgagccaagatcgtgccactctactccagcctggtcaacagagtgagaccctgtctcaaaaaaaaaaaaaaaggcaattgttattaaacttcgagatcttgaaaaaagaaaaaagaacaaaatgcaattgtcattacagcagtctgttttctttttgttttctttatctttttttttttttgagacggagtctcactctgttgcccaggctggagggcagtggtgtgatctcagctcactgcaagctccgcctcccgggttcactccattctcctgcctc[131 bp omitted]ccttggcctcccaaagtgccgagattacaggcatgagccaccgcgcccggccagcagtcttttttttctgtttctttcttttttttttttttttttttgagacggagtctcgctttgttgcccaggctggagtgcagtggcgtgatctcggctcaccgcaagctcc[135 bp omitted]gcctcccaaagtgctgagattacaggtgtgagccaccgcacctggcccagcagtctcttttttcaaaatccctctgtgggtgtcacctggccccaggcttgcttcagcgacactagtctactttcagttccatgctcctgtcatgttcccttatatgccaggcctttgcacaggctgttccctctgcctggcacactcttccctgttttctgcctagccaactgtgcgaatccttcagatctcatttcaagcactgcttccttaggaaagctttcgtggagctccgataacgagccgctatgcatctgtccaatggggaacgtggcagagaagccttttgacactttattggtagaatttgtcgattcatgtctatttctttttttttgagacggagtttcactcttgttgcccaggctggagtgcagtgacacgatcttggctcactgcaatctccgcttcccgggttcaagcgattctcctgcctcagcctcccgagtagctgggattacagggcctgccacgacgccctgctaattttttgtatttttagtaggcacggggtttcaccatgttggccagactggtctccaactcctgacctcaggtgatccgctggtctcagcctcccaaagtgctgagattacaggcgtgagccaccgcccccggcatttttttttcttttttttttttgagacagtctctgtcaccctgactggagtgcagtggtgtgatttcagctcactgcaacctttggctactgggtttaagggattctcgtgcctcagcctcctgagtagctgggattacaggcacctgccaccacgcccagctaatttttgcatttttagtagagatggggtttcaccatgttggcgaggctggtctcacactcctgacctcaagtgatccgatcgcttcggcctcccaaagtgctgggcaacagatcgagatcctgtctgcaagaaaacagtacaacacaaaaaaactaagtgtcttggctgggtgcggtggctcacacctgtaatcccagcactctgggaggccgaggcctgcagaccatgtgaggtcgggagtttgagaccagcctgaccaacatggagaaaccccgtttctactaaaaatacaaaattagcctggtgtggtggtgcatgcctgtaatcccagctactcgcaaggctgaggcaggagaattgcttgaacccaggaggcagaggttctggtgagccgagatcatgccattgcactccaacctgggcaacaagagtgaaactccttctcaaaaacaaaaacaaaaaagactaggcgtggtggctcatgcctgtaatcccaacactttgggaggctaaggcaggtggatcacaaggtcaggagattgggaccatcctggccaacatggtgaaaccctgtctctactgaaaatacaaaaattagctgggtgtggtggcaggtgcctgtgatcccaactactagggaggctgaggtaggagaatcgcttgaacccgggaggcggaggttgcagtgagtcgagattttactactgcactccagcctggcaacacagcaagactctgtcttaaataaataaatcaataaagtgtcttagttggtcccaccctatggagaggctgggttttccggaatctgctggaatgtggcaggggccactaaatgcaaatgtgtcatggctgcagggttgacagacaccctgcagcaagagggagggaggtaccagtatgttgcagttcgaaggtggctggagaagtatttcagggccattcccccaagaagacaaaccctggaccagtctttttaaaatttaatttaatttaat[211 bp omitted]gaggcaggagaatcgcttgaacccgggaggcggaggttgcagtgagccgacattgcactactgcactccagcctggcaacacagcaagactctgtcttaaataaataaatcaataaagtgtcttagttggtcccaccctatggagaggctgggttttccggaatctgctggaatgtggcaggggtcactaaatgcaaatgtgtcatggctgcagggttgacagacaccctgcagcaagagggagggaggtaccagtatgttgcagttcgaaggtggctggagaagtatttcagggccattcccccaagaagacaaaccctggatcagtctttttaaaatttaatttaatt[214 bp omitted]gaggcaggagaatggtgtgaaaccgggaggcggagcttgcagtgagccgagatcccgccactgcactccagcctgtacgacagagcaagactccgtctcaaaaaaaaaagacaaagaaaaattaaaaactagacacagggtctccctatgttggccaggctggtctcaaactcctaacctcaaagacatctgcccaccttggcctcccaaagtgctgggattacagacacgagccacagcgcccagcctcagccgctgtttcatttcagccatgcagggccttgcaggcaaagccaggccttttggattttacttcaaatgctgtagggacctgatggagattttcagtgagggaacaggatggcctttttcatgctgagagttcttttgttgctccaggaatacaattgacaggtaaaattcaggatgcccaattaaatcagaattgcagataaacaatacattttttttgagacagagttttgtgcactgtctctctctctctctctctctctctctctctctctctctatatatatatatatttttttttttttttgagacagagttttgctcttgtcatctaggctggagtgcagtggtgcgaccttggctcactgcaatctccgcctcccgggttcaagcaattctcctgcctcagcctcccgagtagctgggattacaggcgcccgccaccatgccctgataattttttgtatttttagtaggcatggtgtttcaccatgttggccagactggtctccaactcctgacctcaggtgatccactcgtctcagcctcccaaagtgctgggactacaggcgtgagccaccgcccccggcatttttttttttttttaagacagagtctcactctattgcccaagctggagtgcagtggcgtgatctcagctcactgcaaccttcacctcccgagttcaagcgattctcctgcctcagcctcctgagtagctgggattacaggcatacgccaccacgcccagctaatttttgtatttttagtagagacagggtttcgccatgttggccaggctggtctcacactcctgacctcaagtgatccgcccacctcggcctcccaaagtgctgggcggcagatcgagatcctgtt[133 bp omitted]cctgaccaacatggagaaaccccatttctactaaaagtacaaaattagctaggtgtggtggcacatgcctttaataccagctacttgggaggctgaggcagcagaattgcttcaactgaggaggcggaggttgtggtgagccgagatcacgccattgcactccagcctgggcaacaagagcgaaattccatctcaaaaaaaaaaaaaaaaaaggtccgggcgcagtcgctcgtgcctgtaatcccagcactttgggagcctgaggcaggcagatcacgaggtcaggagattgagaccatcctggccaacatggtgaaaccctgtctctactgaaaatacaaaaattagctgggtgtggtggcaggtgcctgtgatcccaactactagggaggctgaggcaggagaatcgcttgaacccgggaggcggaggttgcagtgagccgagattttactactgcactccagcctggcaacacagcaagactctgtcttaaataaataaatcaacaacgtgtcttagttggtcccaccctatggagaggctgggttttccggaatctgctggaatgtggcaggggccactaaatgcaaatgtgtcatggctgcagggttgacagacaccctgcagcaagggggagggaggtaccagtatgttgcagttccaaggtggctggagaagtatttcagggccattcccccaagaagacaaaccctggatcagtctttttaaaatttaatttaatttaat[150 bp omitted]aaatacaaaaaaaattagccaggcgtggtggcaggcgcctgtagtcccaactactcaggaggctgaggcaggagaatgtcatgaacccgggagacagagcttgcattgagccaagattgcgccactgcactctagcctgggcgacagagtgagactccgtctcaaaaaaaaaaaaaagaaaaaagaaagaaaaattaaaaaatagacacagggtctccctatgttggccaggctggtctcaaactcctaacctcaagacatctgcccatcttggcctcccaaagtgctgggattacaggcacaagccgccgtgcccagcctcagccgctgtttcctttcagccatgcagggccttgcaggcgaagccaggacttttggattttacttcaaatgctgtagggacctgatggaggaacgggatggcctgtttggtgttgagagtcctcttgttgctccaggaatacaattgccagggaaaatccaggatgcccaattaaatcagaattgcagataaacaatacattttttttgagatggagttttgcatgctttctctctctctccctatatatgtatacatatatatttttttgagacggagttttcttcttgtcacctaggctggagtgcagtggtgcgatcttggctcactgcaacctctgcctaccaggttcaagcgattctcctgccttagcctcccgagtagctgggattacaggtgcccgccaccatgcccggctaatttttgtattttttgtagagatgggttttctccatgttggccaggaaggtctcgacctcctgacctcaagtgatctacctgcctcagcctcccgaagtgctgggattacagatgtgagccactgcgcctggccatcaatgaatgatttttaagcataagtatatcccaaatattgcatgggatatacttatactaaatatttctatctttcctctaaaatccaatttaggtcgggcacggtgtcccaggaggctgaggcaggagaatcgcttgaatccaggaggtggaggctgcagtgagccaagatcaaaccactgcactccagcctgggagacagagggagactccgtctcagaaacaacacaaaaccaaaaaaggtggacagagaagggtagaggcaggggacggggagaagtgggagattctgggcagtgtggagaccgagcccctctggcttattgatggattgcacatgggcagatggcacaggctcatcactaggaagactttggcattgatcctaagtgcgggggaggaagccgaagctgctgtaagcagaggagacacaggatctgactcaggtatgagacccacaaagcagccctggggctcaatagcaacctctgtgaattacaccagcacacagtttctccccctgtgtactgtgatattgtgggtggcttttttttttatttttatttttttgagacagtgtcttgctctatcacccaggccggagtgcagtagcacgatcatggctcacttcagcctcgatctcccagactcaagtgatcctccagcctcagcctccctaatagctgggactaaaggtgtttgctgctacagccagctaatttttcatatatatatatatacatatatatatttagactgactcttgcactgtcacccaggctggagtgcagtgaggtgatctcagctcactgcaacctcagcctcccaggttcaagagattctcctgcctcagactcccgagtagctgggattacaggtgcacaccatcacgcctggataatttttctttttttttttttttttgagacggagtcttgcactatcacccagtctggagtgcagtggcacgatctcggttcactgcaagctccacctcccaggttcgcgccattctcctgcctcagcctcccaagtagctgggactacaggcatccaccaccatgcctggctaattttgttttcgtatttttagtagagatggggtttcaccgtgttagccaggatggtcttgcctgacctcgtgatccgcctgccttggccccccaaagtgctgggctgggtgtgagtcaccgtgcccggccagtttttctttttctcttttttttttttttgtagagatgggggtctcacagtgttgcccaggcttgtctcaaactcctggtctcaagtgatcctccagccatggcctcctaaagtcctgggattacaggaatgagccaccatgctcagcccccttggtactgttgacattcaggataaacaattcctgattgtgggggccgtcctggacactgcagggtgctgaacagcgtccctggcctccaccctctccacgccaataagactcttctcccccgatcccctgcagttgtgacagccaatacaaccagacattagcagaggggagaattctccccaagtaggacccctggtcttggcactgtgagaccccagtaggctggggcagactcagggtggaaaaggcaggttatgccgggtttgggtcctgggagaccttcccggtttcctttgtccattccaggcattcagtgatagttctagggaggggagacacagatacctaaaccgctagagcttggggaggttgcagacaacctgttgcccactcctcgactcctctgagagtcacctgtgcaagagagagggcttcctcctggtagagactaataaagcttttaatatttaaaagttcgggcacttaattctggtgatctgggttcacgggtaacactccgtcctctgacagctggcagatggcagagtccactgaggcgctggtgatgatgatgggaactttggccttgaggctggtcagggaccagggcaggtgcacggtggtgaccagctcgtagcgagtgtgcatgatctcaccgtcctgcgtgctgctgctcacggacagcagcaacggcaggttgaaggtgctgacaaccttggtggtgttgaagcgggtcacgggggtgttggcctcctgcctcagaagctcgctgctgtccagccgagaccgccgctctgcactgggcgtgaagccctcgtactgtatgtgggcatacagggcgaatacgaccgtcttgatgcatttgctggtctggttgttgatctctgttgtgaagacgaccttctctcctggcgtgaaggtgttcctttccatctggatttgcaaacagacagtgccctggcggcagcagttgtaggagactttctcctcagcctccacgaacaaggggttctaggaggatgtgggggaacagacaaccgtgagggaccaggaccacaaaatccacttgcctgcctgatccaccctgggaactcctcaaagtctgtggggctggctgggcacgatagctcacgcctataatcccaacaccttgggaggccgaggcgggaggatcaccatgtcaggagttcgagaccagcctggccaacatggcgaaactccatctatactaaaaatacaaaaattagctgagcgtgatggagcatccctgtaatcccagctactcaggaggctgaggcaggagaatctcttgaacccgggaggtggaggttgcagtgagccgagattgtgtgattgcacttcagccagggctacagagcaaaactccgtctcaaaaaaaaaaaaaagtctctggggctttgggggctctcctaggaagaggcattaagatggaatctggaagcctagggattttgcagtcaaaaacctggagtcatctcccatctcccagcatgttttgttttttgttttttgtatttttttggagacagagtcttgctctgttgcccaggctggagtggagtggcgtgatctcggctcagtgcaacctccgcctcccgggttcaagcgattcttctgcctcagcctcctgagtagctgggattacaggcgcacgccaccacacccagctaattttttgtgtatttttagtagagacagggtttcactatgttggccagacttgtcttgaactcctgaccttgtgatccgcctgcctcggcctaccaaagtgctgggattacaggcatgagccactgcatccagcattttttttttttttaatgcagcctggagtgcagtggtgcactcatggctcactgcagacttgacctcctggactcaagtgatcctcctccatcagcctcccaagtagcagggaccacaggcatgtgtgccaccacaccccagctttttttttttgaaagaaggtctcactatgttgtccaggctagtctcaaactcctgggctcaagcagtcctcccacctcagcctcccaaagtgctgggattacaggcatgagccactgtgcccagcctgcttttatttttaaaaagttgtttgcaacatagcaaattgttatttctgatatttttattctacttgttgcctgttctgttcttttatcttaatataaaaaagtggttgcaacctgctaaattgattttttgtgatattgcctatttagattcttgcctattctttcattttataaaaatatggccaggcgctcccagcatttcaggagg[134 bp omitted]gaggcgggagaattgctggaatctgggaggtggaggttgaagttagctgagatcgcgccactgcactccagtctggcgaaagagcaagactccgtctcaaaaataaatatatatattataataatataatatatattatattattagaatatatataatatattattatatataatatattataataatataacatattatatatatattatatatatatagccaggcgcagtggctcacacctgtaatcccagcactttggggggccgaggcaggaggatcacctgaggtcaggaatttgagaccagcctggccagcgtggtgaaaccccatctctactaaaaatacaaaagttggccgggtgtgatggcacgcaactgtaatcccagctactcaggaggctgaggcaggagaatcacttgaacctgggagactgaggttgcagtgaggctgagatccagccctgcactccagcctgagcaacagagtgagactctgtctcaaaaaaaaaaagaaaagaaaagaaaagaaaatgcttgtattccaccaaatggatttttgcaacccacgactgggttgtgacctgtgatttgaaaaacattgctggctgggcatggtggctcatgcctgtaatcccagcactttggggaggccaaggggggaggatcactggagcccagaagttcaagaccagcctgggcaacatagtgagaccctgtctccaaaaa[131 bp omitted]aaaccccatctctactaaaaatacaaaaaaaaaaaaatagccaggcgtggtggtgggcacctgtagtcccagctacttgggaggctgaggcaggagaatggcgtgaacccaggaggcagaggttacagtgagccgagatagcgccactacactccagcctgggcgacagagcaagactctgcctaaa[362 bp omitted]gaggc[138 bp omitted]gtgcctgtagtcccagctactcgggaggctgaggcaggagaatggcatgaacctgggaggcagagcttgcagtgagccgagatcgcgccactgccctccagcctgggcgacagaatgagactgtctcaaaaaaaaaaaaaagaagaagaaggagaaggagaaggagaagaagaagaagaggaagaggaagaggaagaggaagaagaagaagaagaagaaaatcatactgcaggaagtcaggtatgtttcctttttgagaactcaggcagacccttgaccccctctgacctcacctcccacttttctgcctctggcttctcttcagccttttcaggagcagctggagctccccctcctctcctgaaggttaattgaatctggttacattgtaaatccctgcagtcttattcgaaaattcgtagcatgcgttaggaccctgcaggtgtgaaagaacctgctgccctaactccagacaaagctggtatttctgtcctggtcctgaaggaggtatcaggaggtgccaagagctaccaatgtcccttatttccaaatgagctattacattttttttttaatagcggtaccggctaggagcggtggctaacgcctgtaatcccagcactttgggaggcctaggcaggcggatcacctgaagtcaggagtttaagaccagcctggccaacatgtggaaactccgtctttactaaaaaatacaaaaattagctgggcgtggtggtgggtacttctcatcccagctactcgggaggatgaggcaggagagtcacttgaagctgggaggcagaggttgtattgagccaagattgcgccactgcactcccgcctgggtgacaaagtgagactccgtctcaaaaaaaaaaaaaaaaaaaaaaaaagaaagaaagaaaaaggaaaaaaaatgccagccctctgacatttgtcgtcctgtcccaatgctctgatgacaaatgactccctggagatgtgaagtgactttggccaacgtccctcctcccacctcgacttccgcctctgcacctggactcgggaagggatccagaacgagtccttcactcagccaagcggaggctgcactgcccgtccttctcctggactgaggccaccacctctattgtctgggagctccaaggtcagtgctggagggccactgagtgtacatgcctctctcccaccctgagggtcaccctgtggggccttttcttggcttttccccagggtcgtgtctccctcttgacaagtggacatttgggccattctcctgggtggggccgtcctgggcactgcagggtgctgagcagcgcccctggcctccacccactccatgccaggagcaccccccaagttgagacaaccacagatgtctccagacattgccaaatgtcccttatggggataaaacagccacagttgaaaaccactg[138 bp omitted]atggcgaaaccctgtctctactaaaaatacaaaaattagctgggcatggtggtgcacatctgtaatcccagttactcaggaggctgaggcaggagaatcgcttgaacctgggaggcggaggttacagtgagccgagatcatgcctctgcacttcagcctggtgacagagcgagactgcatctcaaaaaaaaaaaaaaaaatatatatatatatatatatttttttttttttacacacacacacacacacacacacacacacacacacacacacacatatatataattttattttagagacagggtctcactctgtcgcccaggctggagtgcagtggtgcaaacatggcttactgcagccttgacctccagctgccctaaggtttctgactcaccttttgtgaaatctcggggcctgggaagctgccaacacccttcccttctccccatgggaccttctctgtcccctgcctgcccaccttccctcttcctccttggagcttggagattgttcccacctccacctttcccccatcggtacctggaatggggtttctttgtggaaggtggaagttccttgaaccaataagtacatcctcttcttggctaaaatgtgttccctgcccatgcaggaagcttgtacgaaatagaagacatggccaaatttgctggtgaaggtagaaggaagcctgggaggtaagttgaaatggaagtcaaaggtgtggctgcctgcacttaaccaattatctgaaagcaaaacacaccgatgccatcagaaggttctagaatcttttttccttcttcttctttttttttttgctttatttttatatttatttatttttgagacacggtctcactctgtcacccagtctggagtatagtggtgtgatctcagctcacagcaacctctgcctcctaggttcaagcgattctcctgcctcagcctcctgagtagctgcgactacaggcgtgcaccaccacacctggctaatttttatatttttgacagagatggggttctgtcatgttgtccatcctggtcttgaactcctggcctccggcgatccgcccgtcttgccctcccaaagtgctggggttacaggcgtgagccactgcacctggcctttttttgcttgatttattgttttggcatggaggtgggtcctgggcttggcttgtctgtccctcctgagttaaactgagctctatgcttttaggacctgctgggcctataaatatcaggtcgcagctgggctggagtgggatgccctggggtgggtgacatgcctggagttgtcacccgaaaccactgaagggctcttgcatatccctgccctgagcctgagaaagtggaagtcaggccttcagggttcaacaaatatatctttttttttctttttgtagggacaaagtctggctctgttgcttaggctgcagtgcagtggtgtgatcatggtcactgcagcctccaactcctgagatcaagtgattctcccacctcagcctccagaagagctgggactacaggcccatgccaccatgcctggctaatttttaaatttctggtagagacagggtcttgctatgtttcccaggctggtcttgaacttctggccacaagcagtcctcctgcctcactctcccaaaagtgctgggataataggcacaaactggctgggcccagtggctcacgcctgcaatcccagcactttgggaggccaaggcgggcggatcacctgaggtcaggagtttgagaccaagctggccaaaatggcgaaacccaatctctactaaaaatacaaaaattagccgggtgtggtggcacacacctgtagttccaggtactcaggaggctgaggtgggaggatagcttgaacgtgcgagacggaggttgcagtgagccgagatcatgccactgtactccagcctgggtgacagagcgagacgccatctctaaaaataaataaataaataaacaaagtagtatgtgaggcagagaaaactttcgccctcatagagcttgaccttcagtgcatggtatacagtgggtgcttaatacatattgattgaccaactgagtgatggtctaggaagcagactctcacacaactgccatttccatgacctttgtttcattttccttcttgcacttctcgaaaatcctcttagcattttctatcttctctggcccatggcaatcccaaagatactagggaccctgtctctttctttcttttttgtttttttgagacagaatctcactctgtcacccaggctggagtgcagtggcgtgatcctggctcactgcaacctccgcctcctaggttcaagcaattctcctgcctcagcctcctgagtagctggaattacaggtgtgtaccaccatgcctggctaatttttgtatttttagtagagatggggtttcaccatgttggccaggctggtctcgaactcctgacctcagataatccacctgccttggcctcccaaagggctgggattacaggcataagccatcaggcgggcttggcctttttttttttttttgagacagggtctcactttgtcactcagcctggacctcttgggctcaagtgatcctcttgcctcagcgccccaagtagctgggactacaggcgcgtgtcaccacacctggctaatttttgtatttttcatagagatggggttttgccatgttggtcaggctggtcttgaacttgtgacctcaggagatctgcccacccagcctcccaaagtgctgggactacaggcgtgagccaccgtgcccggcccaggctgtgtttttttcatcactgctgcatccccagcacctagcacggtgtttgtgcacagtaggcactcaataaatgtttattaaataaatgaaaaacctggaacaggc[134 bp omitted]ggcgtggtggcgggtgcctgtagtcccagctactcgggaggc[136 bp omitted]ggatgggcatggtggctcatgcctgtaatcccagcactttgggaggctgaggtggggcagatcacctgaggtcaaaagtttgagaccagcctggccaacatggtgaaaccctgtgtctactaaaaatacaaaaaattagtagggcatagtggcatgcgcctgtaatcccagctatgcaggaggctggggcaggagaattgcttgaacccaggaggtggaggttgcagtgagctgagatcacgccatggcactccagcctgggtgccagagtaaagactgtctcttaaaaaaagaactagcggccgggcgcggtggctcacgcctgtaatcccagcactctgggaggccgaggcgggtggatcatgaggtcaggagatcgagaccatcctgg[135 bp omitted]gcttgcagtgagccaagattgcaccactgcactccacgctgggcgacagaggagactccgtctccaaaaaagtaaataaataaaagaaaagaaaacaactagcaacattttttttttctgagactgaatctcactctgttgcccaggctggagtgcagtggtgcaatcttggctcactgcaacctccgtctcccttggcctcccaaagtgccgagattacaggcatgagccaccgcgcccggccagcagtcttttttttctgtttctttcttttttttttttttttttttttgagacggagtctcgctttgttgcccaggctggagtgcagtggcgtgatctcggctcaccgcaagctcc[135 bp omitted]tggcctcccaaagtgctgggataacacgtgtgagccactgtgcctggccagaaatagcaatttttaagcatttactgtatacctggcattattctaagcgctttatgtgccattaaatcattaagtccttaacacaatcttatgaaataggacctcttcctactcccattttatagattggttaactgagagccagagaggtcacataattgctcagtattagtgtctggtaagttgacatttgtccccaggatatttgcatggctggagtccctcctatcactcagttctgtgcttggttgttccctctttgcagagtactcctctggtggaacagaccatctcatctaaatttttaaagtctaaaatggccaggtgtggtggctcatgcctgtaatcccagcactttgggaggccaaggtgggcggatcacctgaggtcgggagttcaagaccagcctgaccaacatggagaaactccgtctctactaaaaatacaaaattagctgggagtggtggcacacgcctgtagtgccagctactcgggaggctgaggcgggacaatcggttgaacccaggaggtggaggttgcagtgagccaagattacgccactgcactccagcctgggcaacgagtgagattcagtctcaaaaaaaaaaaaaattgctagttctttttttaagagacagtcgtttgaacccaggaggttgcggtgagccgagattgcgccattgcactccagcctgggcagcaagagcaaaactccgtctcaaaaaaacgaaaacaaaaaataaacaaaaattagccaagcatggtgccatgtgcctgtggtctcagctactcaggaggctgaggtgagaggatcgcttatgccagagaggctggggctgcagtgagttttgatcacaccactggcctctagcctgggcaacagagcgaggccctgtctcaaaaataaatacataagccaggcctggtggctcatgcctgtaatcccagtactttgggaggccgaggtgggcgaatcacgaggtcaggagttcgagaccagcctggccaacgtggtgaaaccctgcctctactaaaaataccaaaaattgctgggcatggtggcgggtgcctgtaatcccagccactcaggaggctgaggcaggagaatcgtttgaacccgggaggcggagcttgcagcgagccgagatggtgccacttcactccagcctgggaagcagggcgagactgtgtctcaaaaaatagataaataaataaataagatacaaataaataaatacagaaataaattaaattaaattacactttgttcagccaagtgttggccacgtgttctgcttgactgcttaatacctgggaatatccccacaaacacattttgcaatggacatataatttccccgacaactcagcagactctctgacatttgttcagatttcagatctgacctggtggaactggggactagttattccttctctggaaggtctcccttgctcttctacctccactatctttctttttttgagagggaatctcgctccgtcacccaggctggcgtgctgtggtgcgatctcagcttactggaacctccccttcacgagttcaagtgattctcttgcttcagcctcccaagtagctgagattacaggcacgtgccagcacgcccagctaattttttggtattttttggtagagatggggtttcgctatattggccaggctggtctcaaactcctgacctcaagtgatccacctgcctcggcctctcaaagtgctggaattacaggtatgaaccactgtgcctggcccacctccactgtctctccccatgaatgcaggactgcctactttgtctcctggggttttgctgtcagagtgaaacttatctgtaaaagaataagacttctcagaggcctctcaaaggcagttgttggattgagcattttccaaggagactactttgaaccttcattttgaatatcggggttccgatcagctccttatgtcttgttatttttgcgttttgtgtatctgatggtcattgttcttcatggcctccctcctagggagaaatcaggccactccctatttctgatagccctagagttttgttgattgactctcggatgtgtttattttccagacccaggttcctgtcatggctaggggtggctgttggcctcgtccttaccctccactgggaatgtctttgtcttatgcacgtagtctgccttgttgttgcaaataacatttctgctataatcacaggatgccccggcttcttcactccattcgacgtaaccccttcccacgagctccaccttcactatggggtccaccagggtgctgttcagggttaagatcacctgcccttttatgctggagccagccaggtagattctatcctcgggcagcactaattcgatcgacttcaccacagacatggggggttggggggtagagagacattcctctctgtcccccatgtccctgaaattcccggttcgttggccctagtgaggtaatccatctatgacatcactcagctcagagttccgggaagtggggaccccagtggccaggaggggaggcaaaactgttgtttagggtgggtggttgattgggaaacctgtagtcctcactggttctttttttttttttttgagatggagtcttaccctgtagcccaggctggagtgcaggggtgccatcttggctcactgcaacctccgcctcatgggttcaagcaattctcctgcctcagcctcctgagtagctgggaccacgggtgcat[139 bp omitted]ggctttttctttttttgagacaaagtctcattctgtcacccaggctggagtgtagtggcgcgatctcggctcactgccacatctgcctcccgggttcaagcaattctcctgcttcagcctcctgagtagctggaattacaggcatgcaccatcaccatgctttgctaatttttttttggtatttttatttattttatttttattttttgtgatggtctcactctgtcagccagactggagtgcaatggtgtgatctcggctcactgcaacctctgcctcctgggttccagcgattctcccacctc[134 bp omitted]tggcctcccaaagtgctgggattacagttgtgagccactgtgcccaggtgcatacacactcattttcatcttaaagactctacatttatattggtctatattggaaaaaacatagagatatggccaggacctgaaatctggtgcgcactgaagttgatcagggcagtgtgtgcttaatctgaacatcgacaccatcaggaagcagcaactccctgcatgattgacatttctctttttttttgaggtggaatctcactctgttgcccaggctggagtgcagtggcgtgatctcggctcactgcaacctctgccccctgggttcaagcgattctcctgcctcagcctcccaagtagctgggattacgggcatgggggttacaggcacctgcccccgtgcccggctaatttttgttctttttgtttttgtttttgttttttttttgagattggagtctcactttgtcacccaggctggagtgcagtggtgcgatctcggctcactgcaagctccgcctcccgtgttcatgccattctcctgcctca[227 bp omitted]aggctgatcttgaactcctgacctcatgatccacccgcctcacttggcctcccaaagtgctgggattacaggcatgagctaccacgcctggctgacatttctctttatgcctgcatctcccccattggatgggaagtccctccagggtgagaccttgtctaagtgaactttgtgcccatcaatgtctgcgtgacccaggcaggatctggctcagccaggagtgggtgtggggggtggaatcaataaaagtttgttgaatgacttaatgacctctgagaatgtatcattttgcaaaagggaaactgaagccctttgcactctaacaattattcctggcacctgatttgcacatggtctggtgcctgagagggagggacattgaatcataggaggggctaggaagtacccattctctagcctggcaggccttatttcttgtcttggctgtatcttgcattattttatgtgatagcttttgtgggcattggcctcttatttccctaagtcaagctcatccaacccctgacccacgggcc[137 bp omitted]agctctgcctcccaggttcacgccattctcctgcctcagcctcccgagtagctgggactacaggcatgtgccaccatgcccggctaatttttttttgtatttttagtagagatggggtttcaccatgttagccaggatggtctccatctcctgacctcgtgatccacctgcctcagcctcccaaagtgctgggattacaggtgtgagccaccacacccggccacaaatttgtagtttcttaaaacattatgagatttttttgcaattttttttttagctcatcaggtattgttagtgttagtgtattttattatttatttatttatttatttatttttgagatggagttttgctcttgttgcccaggctggagttcagtggtgcaatctcggctcactgtaacctccgcctcctgggttcaagcaattcttctgcctc[133 bp omitted]tggcctcccaaagttctgggattacaggcgtgagccactgtgcccggccagtgttagtgtattttatgtgtggcccaagacaattcttcttccaatgtggcccagggaagccaaaagattggacacccctgctctaagtgacttgtgagctttttttctgagacgcctggaatagtttgttactcatgtttttaaatgattaacttgagcaattattactattttttgagacagagtctccttctgtcacccaggctagagtgcagtggcgcaagcatggctcactgttgccttgatcttctgggctcaagaggtcctcctgcatcagtgtcctgagtagctgggactacaggtgcacaccaccatgcctggctaatttatttttattttttgtagagaagggttctcactacgttgcccaagctggtctcaaactcccgggcgcaagagatcagccttcctcggcctctcaaagtgctgggattgcaggtgtgagccactgcacccagctggacaattaacctgagctaatttgaaaaattttgatgttctcaagatgactagggaactggagccctcaatcaacagtcctcagtatcttttctgcagggagggctagatacctcctctgtgacacttaacttccattatccaaggtgcttaggctgtgcccctcaccacgtgtacatgaagaatgcatgcccagccaatcacagtggctcatgcctgtaatcccagcactttgggaagtccaggcgggcagatcacctaaggtcaggagtttgagaccagcctggccaatgtggtgaaaccccatctctactaaaaataaaaaattagccggacatggtggtgcggacctctagttcctgctactggggaggctgaggcagaagaattgcttgaacccaggaggtggaggttgcggagagccaagatcataccactgcactgcaggctgggcaccaaagcaagactccatctcaaaaagaaaaagaaaaaaagaaaaagaaaaatgtattccctctttcagccacgttgagttttcgcaacagcgctacaaacagatgatgtgttctgatagaaataggctaggttcctgcagcaggtgctgtcattttggaagagctcaagccgtctcacaccctcaggtgggcctgctcatacctgtggtgtgggttctacctggctgatggctgagggtctagaattgtgtgcagtagcgttgatcgtgtactgaggttgcaaacagtgaacagcaccatctggacatcgtggattagaatgcaggagcttcccaaggctgctatgacaaaggaccacaaactcagtggctgcaaaacacacatttatttatttgttgatagagccttgctctgtcacccaggtgggagtacactggctcgatcttggctcactgcaacctccgtctcctgggttcaagtgattctcctgcctcaatctcctgagtagctgggattataggcacacaccaccctgcccagctaatttttttttttgagacacagtctcgctctgttgtccaggctgaagtgcagtggcacgatctctgctcactggaacctccgcttcccaggttcaagcaattctctgcctcagcttcccgagtagctgggattacaggcgccggccaccacacctggctaatttttgtatttttagtagagatggggtttcaccatgttgaccaggctagtctggcgactcctgacctccagttatctgcctgcctcggcctcccaaagtactgggattacacgtgtgagccaccacgcccggcccacacatttatcatcttacagtttgggaggtcagaagtctgaaataaattttaggggcagggcgggttctaggagtctttcttgctttttctagccaccagaggctgcccatcttccttgcctcttggcctgatctttttttttttttttttttttttttgagactgagttttgcttttgttgcccaggctggagtgcaatggcgcgatcttggctcaccacaacctctgcctcctgggttcaagcgattctcctgcctcagcctcccgagtagctgggattacagacatgtgccaccacgccaggctaattttgtgtttttagtagaaacggggtttc[132 bp omitted]cactttcccatctcctttgactttgaccttttgtatccctttttcacttattaggaccttttaaggacattgtgcccacctggatcacccaggagacgctccccaactcaaaatcattaactgaatcacacctgcaaagttgcaaagtccttttagctgtgtaaggcactgtattcacagatcctgggggcgaggacgtgggggtctagagacgcatatcttcgggggccatgatctgtctcctatattagggacatagcagaagtcccactgaccagatagaggagacttaatagagtgacgaagaaactgtaaaaagctaagtgggaactcaacatttttctgctcacagctctcaagggaaagaccaaagtcctccccggtggccttcaaggtattatatatcacccctctgacctcaactccccctcccctttgctcagtgggccccaaccacaccagccccttcctgctccctggacacctctaagccttttccggcctctgggtttgactttccctcctagacccatctgtccttggagtctcatctccgattccagctcaaatgtcatcttctctgagaggcccaccgcagtggccccagtgagagagtatcctctctccccgcctcccaccacatggctgctggtcactctcctataaggaatcatctgaaattatctgctttagttattcatttcttgcctgtctcccccagataggaattttccctccctgagaccaccaactgggtctgccatgtacaccgctgggttctgcagctctgagcaacctgtccggctgctttgtaggtgcccagcacaggtcactcctgtgcccgccaggactggtcagagtggaacagacagggcggagggggcagggcagccctgcccgcctggacagcctggagaaggcgggaaaacgaggcgggaaaagacagcaaacaagccctgcgggtgggtagagtggggagccctggcaggccctgacgccaggcagtggggcttggggcgatcgggcgagccatcagggtgcaggtggtctcctaggggccccccacattccctcgcagtatttacacattgattccggccttcttagacctactggtcaatgcgtgcgagtggggggctgcgaacggacttggacttaagagttcagggggtctgtaccctgggggtccccaaggctcctggggtgtccacgtgcggggggtgaccaggccctgccacgcagcccctttgcacgctgggcgcgcccagcagagcgcgcagggctgggcggagccgtggcccactaggcggaggcgccgtggacagaggcgggggcgccccccaccctctttctcgcttcccgccactgcgtcggccaatcaggaggcaggcgcccgcccccggcacggcctcctgcggccccgcaactcccaaatgccgagttttcgcgggaaaaaaatcagagcagctggcagcgcggcgggcagcgtttgccgagcgggcgctccgggtcgcacgcaagtccgcgcggggtccgggccacgcacgcggtttcatcgccatccccagccgggccacgcgcgcaggcagacaagctgttcgcggcgaccggagaggtgagcgggcgggccgggtcggggtgccagcccgggccgggcgcacggggctcgggaactttgcaaaactttcccgcgcggccagcccgggcgcacgcatgtcccgcactctgtcccgggatccagggcctccccttccacctaaccctcgggaatcgttccccggcacacatccggctggagccgggaccagcgctgcgtccccggagcccggcggggggtcgagcgcgccgggtgggggagggcctggcgagccgccggggaggatgtcaggctccgcgcctgcgcgcggggcgccccgcgattcaattgtcgcgcccgagcccgatttcgcgcgccctgagttccccgggagcatctgggccaatggggagcgagcggggcggggcggccgggtgctgcggagccaataagaggcggctcaagtgaaggggggcgggacttgacgagcgggggccccctctgtagtcccggcggcgggggtgggcgtgggctcgctggcgcgacccgcgcgggccagtgggagtgcgggagggacgccgagggtccagggtttggaggggcgcgagctgccgggggttggaggtcgaggtgagtcgcggggcgcgcgcgctcgcgggtggccgggacggggcggccggttaccatggccaccgcggggcgggcccggtcgcgcacgcgcgcggggggggccggcaaggagggggggcgtgggcaccgaggggtcccggggtccgcggatctcgggtggggtttttccctctcagtggcacttggttgagttcccccgggacttctgaagttccggcccgcgctggacttctgggattccctcttccgtaaataggaatccgaggaatgaatgaatcaatgaatgaatgaataaacgaaccaactcggccacttggcccgggcctcctttctcctctggtcgtggggaaggagggatgggttggaccttctgcttttctttcaattccctcttttcattctccttcctcctcaatcttcaacacttggctagtcgttaatgccttaagtgcttaatttgttgtgtctggtcctggccagggtctggctgtacaggaggactggaagggcatcctgggagtttcctggtgtccacaggccggacaaaagcaaccccgactccttagagcatggcatggctcagaggtgctggtaaaactgatgggggtttttgctgtccctcccctcagcgccgacaccatgtggatccaggttcggaccatggacgggaggcagacccacacggtggactcgctgtccaggctgaccaaggtggaggagctgaggcggaagatccaggagctgttccacgtggagccaggcctgcagaggctgttctacaggggcaaacaggtacacccgccgccagcacctttgttctatgcctggtccaggcctcgcgcctctgcagccaccagccgatactttctccctcccacctccccccccaacaacctcgtccggtcccacttcatctctcccggaaggagaagtccacagaaacctcaaatgcctgcgagaggaaggaacaaagggaggactcacagattgacacgctgggctggcggctggccctcgaatctatagggtctgggcttttaaacttcttttttcaaagctccgcctcaaaataatggctagagaaagaagttttggaggtggccgatggaaggctgaggaattttcgagaaagggcccaggaccatctggtagctaggacggaggggaccaggttttcttttttaaacatccaccaccaattgctctcagcctgtaccggttaagcatcagaccctgcgagtgtttgtttctaaaaatttggattagcttattcagagtctggagatggcgcttgctaatcaggaatttccgccaccctgagcctgctgtgctgcggctgctgctgacctggggcgtgtggtccccgaggggtccaccgaccctcgtctctttctctgttctgtctccagcccctcgttgcatttaaaatgtccccctttgatttcatagctgccacgtttggggcgctccctccattggcacctgggggtggaggtgctactttggttggtgtttttgtgggggactgtgggacctactgggagtggggtttcccggcaggatgagacagtgtgatcgaaggtgtaggtcccatctgctggagttggttggaccgtggggacgggcgtagactactggaactggattaaaagtcgtcagttgagctgcgtgtaccccactgtgttgttgttggattttgaaccgggtactgctgccatctggtgtctaggttggaaaataaacactgcgcccggccaggggtttttgggggctgggaggatcatgcctgctcactccagatgagacctgatgattaatttctctggcttgcatgccataggagaccttcattagccctcttcccgtaagagacgtgatgacttgagtcttaagaatctgagttaacccgccctgccccgggaggaggcgatctggagaacttggggagttgacggtgcaagccgcgtgtgtgcagagaagaggcagggccgggctcgacagaggagctccgcctggcgctctcttcctccctcctcctatgatgcgtgctccctttgtggcatccaaactgattttgatttgccactcagcctattgggtcagcacagaaggcttcatttcacaaagagtttctgaagcctgcaaggaccttctaagttcacagcgtaggtcagtggcgggttggactctcatgctcccaagttcaggagaggagataatgctgagtatccactctatgccagccaccgagctagcattttaacttttgcatttcaaccatgcaggaatgggaaaacacctagacacacctgccatgtagatttcaccatcggtattctgacttattaggtttatcttgaagcgctctgtctttctctctgcccgccaatccatctttttgggatgcatttcaaagtaagttgcagacaccagtccacctttcccttattactgcagcacaccgtcagtacctagagctcagtatttgtttttggttctgttttcattgattttttttgttgttgttcctatttgagacaggatctcactctgcccaggctgtgttgcagtggcacgatcacagctcactatagcctcagcttcctgggctcaagcaatcctccagcctcagcctcccaagtagctaggactataggcatgcaccaccatgcctggctagtttttgtatcttttgtagagatggggtcttattatattgcccagggtggtctcctgggctcaagtgaccctcctgccttggcctctcaaagttttggggttacaggcgtgagctacagtgccggacctaaaagctttgtctatagtgaaacagatgttagacagactgaataattttgacaaatgtctacatccatgcaacccaaaacccctatctcccctcatttgtaacataatacttgagtcatacaatagtgtctgtcacatttctaagtttagtgtgacaatgacaggaacacgtatgttaattagacatgtacattgtgcttttttttttttttttttgagatggagtttcattcttgttgcccaggctggagtgcagtggctcgatctgggctcactgcaaccttcatctcccaagttcaagcgatcctcctgccttagcctcccaagtagctgggattacagtcacccaccaccacgcctgattaattttttgtatttttagtagagacggagtttcaccatgttggccaggctggtcttgaactcctgacctcaggtgatccacctacctccgtctcccaaagtgctgggattacaggtgtgaaccactgcacccagccacgtacattgtgcttttaattgtcaggatgtccgcagtgatgacacctggccctagccttgccggaactcacccggactgaacagggagctgggattggaacctgggattttggtttctgagactgggctctcaacactgaatttcgtctcccaggtcagctctggtagttatgaaaagattcagtgttcctgtgtaaccttcataaccgcctcttagttcccttaccctgtggctgtttcccatgcagtagcttttttttttttttttttttttggagacagtttcgctcttattgcccaaggtggagtgcaattgcgtgatctcggcttacctcaacctccacctcctgggttccagcgattcttctgcctcagcctcccgagtagctgggattacaggtgtgcgccaccatgcgcagctaattttttttgtatttttagtagagatggggtttctccatgttggtcaggctggtctcgaactcccgacctcaggtgattcacacccccctcccccaccttggcctcccaaagtgctgggattagaggtgtgaaccgtcgcatccggcccccatgcagtagcttttaagagatcgtgtcgttgcttctgtcttccgggccacagagaggtgatgcagtttccccacttgcatggctgggaaagtgagctggcagcagggaggtttggacagtggcgggaaggcgggacagaggcacacagcagcacctcccagagcgtgaagtctgcaggcacccaggctaacgtgatagaaagcaacacagttcccggtgggcacaaatgggcagttgtccttatagaatgttctagagtgttcacagtctttttttttccctgtttaaagaaacctggcctagcagcccaaggtctgcagtgaagttgatggagaccccagagcagaacagagttgggtctgtctcggaatatggaggatctcgtggtggtctcacttgggctgaatagggtgacagtgatgtcacttgatgggcgggaacgcagggagctgatcgagggcagtgactttgggcagacggcccagcctaggcaacgggagaggcatctgcggcccccacccctcaatcttttttttttttttggctgcacatcaaaataacaatagctgtcttttgcggcacctttaacctgctcgggtacaacgctctgcactgtacataatcttttcagcatccctggcccgcgactcgccagctcccacatcatcttattttagatagggctaatacccaccacgctgcagcgcagtgcgaattcaatgaggttgtggatttgaagggcggagtgagccctgtgccaggctcacaatgaaagcgaaatcaatctcttagcacagggcctgtcccgctctgcactgtggatgtttggggccaggtcatcctctggctgggaccgtcctgggcactgcagggtgcggagcagcgtccctggcctccacccactccatgccagagcatcctgccctaccagtcatgacaaccacaaatattcccagagacttccatgcctcaaaggcaggattaaggtcagtctgatgcctcagttgaaatggtggcccaggaatggccttgcaagagtcacttgtcacagtgatgcctcaggtgtccccactggacggcccccttgcagagacctgcccttctgtctgcgggagggagggtccccaccaccagctcccacccactgcggcatccctcccccaggatggctccctggtagagggcgcggcctctgttagggtgactcaccactgctgttgtggccccgaagcagctgtagacaatctgtaaaccggtgggcgtggctttgttccaataaaacttgatttataaaaacaggtatggcggggcccagtggctcatgattgtaatcccggtgctttgggaggcc[134 bp omitted]caggagaatcgcttgaacctgggaggtgggaggttgcagtgagctgagatcccaccactgcactccagcctgggcgacagagcaagactccgtctcaaaaaaaaagcaaaacaaaaaacaaaaccaaaacaaaagaggtgcaggccagaattgtccccgtggacatagttggtcaattagattgcatactttaatccagcctcagttggtgtgtctgggttttctggctaggaagaatgctgctgtggaatgtgctggaacagatccttacgtgcgctgtgttggagtctttccaggtcaggggttctcaaacggatttcaggaccctttacatcatccagaatgatccaatagccccaggagcctgtgtctgtgtggattatgtctgccggctgttagtgtgttagaagttgaggccaggcatggtagctcacacctgtaatcccagcactttgggaggctgaggcgaggatcgcttgaggttgggagtttgagaccagcctgggccatgtagcaagaccccgtctctacaaaaaatgaaaattagccgggcatggtggcgcatgcctgtagtcctagctactcgggaggccaaggtgggaagatcacttgagcctgaaaggttgaggctgcagtgaaccaagattgtaccactgcattccagcctgggagacagagcgagactttgtctcaaaaaaaaaaaaaaccaaataaattgaaagctgagaaattcagagcacaagaagacaagcgcgccccctcttttagctgtcaacatggcggagccgtccctggtgacgcagcctccaaaggcctccctgtgccctcctgagaccgcaagagggaaagtggcagcgacagtgatcgtggtgtctttgtggcggttgtgttgacctcactgacccccgaagtgccgctctagggtctgtcctcagcggtgacccggccgggtcgaagggcagagttccgctgtcactagccctccacccgtcctgtgtgctgggatgccctcgcggcgccgtccacgccaccgccgccccctcttgtgggttctgtctcctccgtgtctaggatcctcctgcatccgtttttccttcctcccttctctccctccgtctgtcttgcccgcacctgaggttgtcgcagaggcgctgagacgggccagcaggagctgtggctgcccctcaggaaggcagagcagtttctcacttccttccccccaggtcccgtcaggcccctgcaggcactctctcttccggctggaggtccctcctgatcgaggcttacacggtctttgctgagctcctaaacttctggtttctatccctaaagttggagaaccactgctccccaaacccggtggcattatctgccctgctgtgccgctaggcagtgttcggcaccctgaaagagagcccctgaatgtggcacgaggggtaggaagtgggcagctcggtggggggggggggtgcagtgagcttttagtcttaagttttcgtttttttttttttttttttcttttttatagagatgggatctcgcttttttcaccaggctggtcttgaacccctggcctcaagtgatcctcccatcttgacttcccaaagtactgggtttacaggcatgagccaccacactcggccctttgtctaagttttcaaaaggaatcagcaaacttagttatcaagttgtatttgtatttatctggacacttttttttcttttcttttttttgcctttaagggagacagggtccacaaggccgggcgtggtggcttacgcctgtaatcccagcactttgggaggctgaggcaggcggatcacgaggtcaagagatcgagaccatgctggccaacatggtgaaaccccatctttactaaagatacaaaaattagctggggatggtggtgcacgtctgtagtcccagctacttgggaggctgacgcaggagaattgctggaacccaggaggtggaggttgcagtgagccgagatcacgccactgcactccagcttggcaacagagcgagactccgtctcaaaaaaaaaaaaaaaaaaaaaaaaagagacaaggtcttgctgtcgtccaggctggagtgcagcggcgtgatcatggcttactgcaacctctgttttccaggctcaagcaatcctcctacttcagcctcctgagtagctgggactacaggtgcctgccaccacacccaatatttaaatttttattaattgaaaaaacttttttgcagagacagggtcttgcctggtatcaaactcctgggctcaagtgatcctcctgcctcggccttctgagtagttgggactacaagcatgagctattgggcctggcctagcttttatacaatgcccatgttacaaaattccaaatgtccaaaaagcaaggagaatatcttccactctgccttgaccttcagtttcccccctgtagtaacctgtctgcttccagaagtgcttgaacatgtgtgcgtttgctatgggtttttttttgtttgttttgttttgtttttgagatggagtctcactctgttgcccaagctggagtgcagtggcgtgatcttggctcactgcaacctccacctcccaggttcaagtgattctcctgcctc[137 bp omitted]ggcctcccaaaatgctgggattacaagtatgagtcactgtgcctggcctgtttttttttttttgagacagagtcttgctctgtcgccaggctggagtgcgttggcttgatgtcagctcaccgcaacctccacctcccgggttcaagcaattctgcgtcagcctcccgagtagctgggactacaggcatgcaccaccatgcccggctaattttgtatttttagtagagacgaggtttctccata[133 bp omitted]ttgctctgttgcccaggctggagtacagtggcacgatcttagctcactgcagcctcgaattcctgagctcaagtgatcctcctgcctcagcctcgcaagtagcagggactataggctgtatactactatacctggctgattttaaacatttttatagagatgggttcctgccatgttacccaggctggtcttgaactcctagcctcaaatgatccttctgcctcagcttcccaaggtgctgggattatagacctgagccactgctcctgacctcattttttttttttttttttttgagacagtgtatcagtgtctcccaggctggagtgcagcggcgcgatctcgactcactgcaacccctgcctcttgggctcaagcaatcctcccaccacagccttccaggtagttgggactagaggtaaattttatagtgatgggttttgccatgttgcccaggtgatcttcaactcctggactcaagtgatcctcccgtcttggcctcccaaatcatacctgagattacaggcatgagccactgcacacagccccattttaacttttttttttttctgaggcagagtctcgctctgtcacccaggctagagtgcagtggcgtggtcttggctcactgcaagctccacctcctgggttcatgccattctcctgcctcagcctcccgagtagctgggactacaggtgcccgccacctcgcccagctaattttttgtatttttagtagagatggagtttcactgtgttagccaggatggtttcgatctcctgacctcatgatccacccgcctccgcctcccaaagtgctgggattacaggtgtgagccaccgcgcctagcccattttatcttttctgataatgattttccttttgccaaaaacggcaagtgggttttagattaagtcactccttttaccaggcacagtaggagaccttgagttagggctgaggtggtgtcatttaatagggacattcaacttcactaggttcaatgataggagactttacaaatttccataatggtaaatcttctttcatttaaattattattattgttaatatttttttttttgagacagagttttgctcttgttgcccaagctggagtgcagtggcgtgatctcaactcactgcaccctccgcctcccgggttcaagcgattctcctgcctcagcctcccgagtagctgggattacaggcacccaccaccacgcctggctaattttgtatttttagtagagacggagtttctccatgttggtcaggctggtctcgaactcctgacctcagctgatccgtccgccttggcctcccaaggtgctgggattacgggcatgagccatcgcacccggccaatcatttaaattattaatgaagaataaaaagaggctgggcgcagcggctcatgcttgtaatttcagcacttcgggaggctgaggcaggcagatcacctgaggtcgggagttagagatcagcctggccaacatggtgaaacctcgtctctaccaaagatacaaagattagctgggtatgctggcatgtgcctgtactctcagccattcgggaggctgaggcaggagaatcgcttgaacccgggagacggaggttgcagtgagctgagattgcgccactgcagttcagcctgggtgacagtgagactccgtctcaaaaaaaagaaaaaaaaaagtaagtcccacgtagccatcaccctctgcagtagtcatctgctgtgtctgatcttgttcattttgctcatttctaccctacccacttacctctacctgactggattgtttaagagatgggatcttgctgtgttgatcagggtggagcacagtggctattcacagatgtgatcattttgcatgagaaccccaaactcctgggctcccctgaccctccagcctcagtctgccaagcagctgggactacagatgtgagccactgtactggctcctactggatcattttgaagtgagttacagatgccataactataacacagacatcataggtacaggaatttcagtgcatcttccccagtggctcatggatcacacagatagaaaatcggtcaggagggccacgcgcggtggctcacacctgtaatcccagcactttgggaggccaaggcgggtggatcacgaggtcaagagatcgaaaccatcctggccaacatggtgaaaccctgtctctactaaaaatacaaacattagctgggcgtggtggcatgcacctgcagtcccagctactcgggaggctgaggcaggagaatcgcttgaacccaggaggcggaggtcacagtgagtcaagatcgtgccactgcactccagcctggtgacagagggagactccgtctcaaaaaagaaaaaaaaagaaagaaaatcggccaggatgccgggcacggtggctcagccctataattccagcacttcgggaggccaaggcgggtggatcaactgaggtggggatttcgagaccagcctgaccaacatggagaaaccccatctctactaaaaatacaaaattagccaggtatggtggcgcatgtctgtcatcgcagctactcgggaggctgaggcaggagaattgcttgaacctgggaggcggaggttgcagtgagccgagattacaccactgcactccagcctgggcaacaagagtgaaactccgtttcaaaaaacaaacgaaaaaggaaagttggtcaggatgctgggcacagtggctgggtcctgtaatcccagcactttgggaggctgagtcagaaggatcagttgagcccaggaatttgagaccagcatgggcaacatggagaaaccctgtctgtacaaaaaatacaaaaaactttctggacgtgatggcccatgcctgtagtcccagttacttggaggggccgaggcgggagggttgcttgagcccaggaggtcgaggttgcagtgagccatggtcgtgccactgccctccagcctgggcaacagggagggagaccctgttttaagaagaaaaagaaaattgataaagatgtagatgatttgaacaacacaagtaacagggttaccgtaatgacatggatggaatctgaacccagcaagagagaaaacacattcttctcaggccacgaggagtgcttagggaaactgaccacatacaaggcaagtcttaaaaactcgatttttatttttatttgtatttacttattttgtttatttatttgagacagtctcgctctgtcgcctaggctggagtgcaatggtgagatttcggctcactgcctcccaggttcaagctattctcctgccttagcctcctgagtagctggaattacaggcgtgcgccaccacacccagctaatttttgtatttttagtagagatggagtctc[132 bp omitted]ttgtttttgagatggagtcttgctctgttgcccggactggagtgcagtggtgtgatctcggctcactgcaaactctgcctcctgggttcaagcaattcttgtgccacagcctccccagtagctgggactacaggcgcccaccaccacgcccgggtaattttttgtgttttcagtagagatggggttttgccatgttggccaggctggtctcgaactcctgacctcaggtgatccatccgccctcggcctccccaagtgctgggattacaggcgtgcaccaccgtgcctgaccctttacaaatttagaacaattactgccttactgaccatgttttctctcacctgtggggtcagaacttaacaataactaagcttcctccttcgcgcttcgggttgtgcaagcttcctcctgcctgctttggggcctttctgcaatgttccagaagcggcatcaggaggctgcccagccagctcgtgagttgtgttctggagtcagagttttgtgccagcctgggccaggccccatccccacttcccgccccatttgcccctgtctacatcattgtactgggagacacttcctgtccctcctacgtagcccacgctaagcagggtgcttctatccacctcacctttccgatgtgggaagggccgaagtcatggaggggcgacccgtcaggcccagcaagggtggcacagatgttgtccctagtaacagatgagaggggatgggctgggactgcaggcctggctccccaagctgctcctgcgggtcaggggctgcccattagcctggccagggcccctcattggatccctcctggccgcccagaccacagcccttgcccccctgcctacccgccaccagttctcattggccctgcctccctgcttaactctgccgccttggcttcccctcctcggtctgtctcctccccgacttgtcctctgtctgagtctggcaggacagagtccgaccgtctggccccctcctggctccgtctgctcctcctgccgcctcctgctgtcgaggtcacttggttcttggcctgtctggcccccagccaccctgctggctgcctgctctccaggcagcccctcgcccagggctgcacctccgacctgtcctccgtcttgggtggggctgggactgtattttccatcctctgcagtggtctggtttccctcgtgcgctgaggcccctctgcttggctgcccctggctgccccatgcagctgagccatgagcgcggcctgtgtgcccctctcccgctggctggagctcaggatgctcacgccgctctggcagatatcgctgctgcaaacataggaggagcagctgcccctctgcgcacgtggccttcggacacatgtgagggccgctctagcttgggtgctcactgcgggtgattccaccctccaggggacactgggggatgtctggggacattcatgactcgggcgctcctggcgtggagtaggtggaggcctggagtgctgattagcaccctgcagggcccaggaaggccccaccccagagagtgatcagaccccaaatgtcagctttggcaagagcagtgtgcctggccacagaggtgctggcccggatgcagatgagtgccccatccatccctctgagcgccgtgtggcttgtcccatgctgcttttcctgacccagtgatattgggggcacttgacttctctctttttaagacggagtctcattctgtcacccacgctggagtgcagtggcgagatcctggctcactgcaacctccacctcccaggttcaaatgattctgttgccttagcctcttgagtatttgggattacaggcactaaccaccatgcctggctaattttttaattaatttttaatttttttatttttttgagacggagtctcgctctgtcgcccaggctgcagtgcagtggcgtgatctcggctcacggcaagc[241 bp omitted]gggtttggcaatgttgcccaggctggtctcgaactcctggcctcaagtgatctgcccacctcggcctcccaaaatgctgggattacagagtaagccactgtgcccagccccttttttagaaaaaattaataaactttattttctagagcagttctaggttcacagcaaaattgagcagaaggtacggagttcctatagaccccctgccccaacaggcatagccgcccccactgtcagcctcccccacagagcggtgcatcggttacagttgatggcccgatggccctctgtggagtcatcttcatctctgagtccacagtctacatacaccaaggcttgcccttggtgttaagtttttttttttttttttttgagacagtgtctcacttgtcgcccaggctggaatgtagtggcgtgatctcggctcactgtaacctctgcctcccaggttcaagcgattctcctgcttcagcctcctgagtagctgggactacaggcgcgtgccaccacgcctggctaatttttgtatttttagtagagacgaggtttcaccatgttggccaggctggtctcgaactcctgacttcaagtgatccacctgccttggcctcccagagtgttgagatgacgggcgtgagccactgtgcctggcctgcttcatgttttaaataacggctttattatatccctgcagttcacccagttaaagtacacagttgaggtatattcatagttgtgtaatcatcactgcagtctattttagaacattttgtcaccttgaaaggaaaccctgaaccctgtcccagctactgcttcctttttctgcatctcctcccgcagcccctggcaccctcaaatccccttcctgcctctgtggcttggcctgtcctggaaatttcatagaaatgggatcatgcactgcgtggccttttgtgtctggtgtttctcactgagtgtgatgtcctcaaggtgcatccacactgtggcctgggtcacagccttgctccttttcatggctgagtcgtattttattttgccttatattttatttattttattttatttcttaagacagtcttgctctgttgcccaggctggagtgcaatggcacaatctctgcttactgcaacctccgtctcccaggttcaagcaattctcctgcctcagcctctggagtagctaggattacaggcacccgccaccacgcccagttaagttttgtatctttagtagagacggggtttcaccatgttgaccagggtggtctcaaactcctgacttcaggtgatctgccctcgttggcctcccaaagtgctgggatgacaggcgtgagccaccgcacgcggcctgagtcatattttgacacatggatggatggccacattgtgttgatcctctcacctgttttttcttttctttctttctttttttctttctttttgagacggagttttgctctttttgcccaggctggagtgcagtggtgcaatctcggctcactgcaacttctacctcccaggttcaagcaattgtccttcctcagcctcccgagtagctgggattacaggcacctgccactatgcccggctaattttgtatttttagtagagacaggtt[148 bp omitted]caggctgttgcgagtgatgccgtgtgaacctgcgtgtacaggttgacgtgcctcttcctctccatccgtgccacctctccccaaagccagctgctctgtgctggagagctggccctgagcctcctcctggctcccaggcagcgcctagcatgtcagaggcactcacttctagctgggagaacagaggggctgaagcggatattggtgggccctcgatgtccacggtgggtttcagagcagcccttgaaacccttgtagctgtaggtgggtgtgtacatattcaaacgggtttttctgatgctggtggatcgcttgcttgagccccggagttcaaaaccagcttgggcaaagcagcaagacctcatctctaaaaaaaattagctgggcatgggtgatgtgtgcctgtggtcccagccactcaggagcctgaggcaggaggattacttgagcccaaggttcgatgctgcagtgagctacgattgcaccactgccctccatccttggcaacagagtgagatcctttctaaaggaaaaaaaaaaaaaagtccgggtgcagtggctcacgcctgtaatcccggcactttggaaggttgaggtgggcggatcacgaggtcaggagatcgagaccattctggctaacatggtgaaaccccacctctactaaaaatacaaaaattagccgggcttggtggcgggtgcctgtaatccccgctacttgggaggctgaggcaggagaatggcgaacctgggaggcggagcttgcagtgagccaagatcgtgccactgcactccagcctgggcgacagagcaagattccgcctcaaaacaaaaaacaaaacaaaacaaaacaaaaaaaaacaggccgggtactgtggttcatgctgtaatcccagctctttgggaggccgaggtgggtggatcccttcagcgtaggagttcaaaaccagcctggccaacatggcgagaccctgtctctactaaaaatacaaaaattagctgggtgtgatggctcatgcctatagtcccaagctactcaggaggctgaggcacaagaatcgcttgaacctgggaggtggagattgcagtgagctgagatcacacccctacactccaccctgggcgacagagtgagactccatctcaaaaaaaaaaaaaaaaaaaaaaatttttttctggaaaagatgagtcagcctttatcaggttcttaggtttatggtgaacaaagaaagaaagcctgcagagaagggccttggccttcactgtgacccccatgctgtttgcatttgaacagccgtcaggccttggatccccaaggggcgaaaggaggaagagctgacattctatgtatgtctctctcctcccttttcctaaggtctctctcctcccttttcctaaggatgctcctgaaccagggcatttctgcctctaggggacacatggtgatgtctgggggacatcggttgttgtcatgactggtggaggccagggccgctgcagtgcctctgcagtgcccagcacggccccacggtccagtgcccagagggggagacccagcccatcccagagtggtcagccctaatgtcagccatgcttaggtcgagaaacctgtattaattacatggaaaccaaccgagtccaatcctgctcgcaccaggcacgggataaactcctgacggggcagacgtggaaaccagggggacccccagctcctgggattcacctcctctctcccttcccactcagtgtgtggattttaatgcgtgcagcctcctgggacctcagtagggcacagcatcatgggataaggagtttcttgggggcctgtggaatccttcaccagggggtctcacccagggtgacttcacacccccccaccccataccgtatgatgtctggggacatttgtggtcgtcacaactacggggtgctcctggcatggagtaggtggaggccagggacgctgctcagcaccctgcagtgcccaggatggctccgccccagagaatggtccaggacctggccccaatgtctgcagtgccgggggagaggaacttgttgccttgggggcatctagatggcaaatcatcaggaggggggggtcctagatggcaaaccaccgggagagggtccttgttgggtgttggtggagtgtgaaggggcagcttctgacaaaatgcctcggcttctccagcccccagatacagctcaggtgatgagctcctccttgcatacctgctgagtcaggtgacccgaggggcaggctgtggagccaggccccaggggttgagcgcatcaggataaaagcgcacaaagggcgggtggagctgagggtcagaggaggtgccctggcaggcgagattggcgctggagccttacccaggaagctcataggaagctcatggatgctggcatgtgcctcttgctgttcaggtgggacagggtctctctgtctcgacactggacagtgggaccgtcctgggcactgcagggtgccgagcagcgttcctggcctccacccactccatgctaggagcttctcccagtggcgacaaccacaaatgtcccagacgtggcccagcgtcccccggggtctgaatcatgtttggttgagaagcagtgacagaggtgacacatgttcactgtcacaaaagctgccgtaagcacgaagtattaggaaaaactcccaagacccccatgtgtgcgtggtgccccgtgatgatgttttgtgcttctgggtgcttcctgcatgcagtgccaaaagccctcgctagaggggcctgagaccctgagggaagggactggggtgccgcttgtgagcgggacagccccctggcatggcccaggtatcatggctctttactctgatgcagattgccccccccccacaagggctgggacacagtgtttggttcatcactggtgcccacagatgcccacttggcatttggtggctaaacagcgtctgcctctggtgtccctgcagatggaggacggccataccctcttcgactacgaggtccgcctgaatgacaccatccagctcctggtccgccagagcctcgtgctcccccacagcaccaaggagcgggactccgagctctccgacaccgactccggctgctgcctgggccagagtgagtcagacaagtcctccacccacggtgaggcggccgccgagactgacagcaggccagccgatgaggacatgtgggatgagacggaattggggctgtacaaggtgagcctcccctccgcagctgctctggggttggacgttctccctgccattctggtctttgcatacccagggctcacaggaggggcttcccacgcgcctctctagctctggctgggcagaaatggccaaggggtggtttcctgcacgttccttgaggggaacatggtaccctgggattcctttgtggacctctagagcagagtcctgttcggggcctgcaggtgtcttctccgtgaagcttgcagtggctgtgacgtttctgaacttgctgctaccatgtaagatcaggaaatgtcacagaaagatctgggtttccagcttttttatttttttattttttttttggcagggtctcactttgttgcccagcctggggtgcagccgtgtgatcacagctcactgtagcctcgaactcctgggctcaagtgatcctcccacctcagcctcctgagtagctgatgttataggcatgtgccaccacgcccagctaattttattttattttattacttttttaatacatggtctcattctgtcgcccaggctggagtacagtggtgccatctcggctcattgcaacctccaactcctgggttcaagcaattctcgtgcctcagcctcctgagtagctgggattacaggcatgtgccaccacacctggctaatttttgtattttttgtagagacgggatttcgccatgttggccaggctagtcttgaactcctggcctcaagtgatcttcccgccgcagcctcccaaagtgctggaattataggtgtgagccactgcacccagtctgttttattttttagtagacacagcgtcttaccatgttgcccaggctagtcttgaattccggggctcaagcgatccacctgcctcggcctcccaaagtgctggtattccaggcgtgagccacgacgccctgcctggatttccagcttctcttgacaaatgggcagctctggtctctcagggcctcccagcagctgtggctgaagcagagccgcaggggcctttgttaagacagtccatgccccctggccccgcatccccgtcacccctgccggggctggtttctcatggtcagcggttcccagccagggaggagaaacctcgctgtgggcattcgagtttgcgccctggttccagagcatcccagtgtccgagaaccaaggtggtctcccgtcagttttcctcaccccgttgggatgccagacttccctcattcctcacaggtcaatgagtacgtcgatgctcgggacacgaacatgggggcgtggtttgaggcgcaggtggtcagggtgacgcggaaggccccctcccgggacgagccctgcagctccacgtccaggccggcgctggaggaggacgtcatttaccacgtgaaatacgacgagtgagtcatggcaggtgggcgggcctgggtattcaggctctgtgacgcgcatccttggctgcgggtgttcaggccagagcttggcactgtctcgagatggtgatcaggatctggggccccatcctcgaattcctaacagcatacgaggctgcccacttggggactagcctggggacccgaagccggctgccccctcctgtgtctccgcggagggttctgctcgatcagtggctgaaactgccaccccatcagtttttctgttttattccatcttccgggtttgtcatctctccctcatccccacccctaacgtcagtctccagtctttgcacaagtgtttactgggcacttcctacctgccaagttcggggtccacacaccagtggacacagatggtggctgcgtctgtccgtgctgccatcgtgagatttcacagacggtgtggcttaaacacggacattggttgacttgctcactgcaacctctgcctcctggattcaagcgattctcctgcctcagcctcctgagtagctgggactacaggtgcccgccaccacacccagctaatgtttgtatttttattttattttatttttattttattttttcgagacagagtcttactctgtcactcaggctagagtgcaatggcgtggtctcagctcactgcaacctccgcctcccaggttcaagcgattctcctgcctcagcctcccaagtagctgggattacaggtgtgtggccaccacgcctggctaatttttgtattttcagaagagatggggtttcactatgtaggtgaggctggtctcaaacttctgacctcgtgttccgcccgcctcagcctcccagagtgttgggattacaggtgtgagccactgtgcccagcttattttatttttttgagacagtttcactctgtcccccaggctggagtgcaatggtgtgatcttggctcattgcaccctccatctcccgggttcaaacgattctcctgcctcagcctcccaagtggctgggactacaggcgtgcaccactgcgcccagctaatttttgtttttgttttgtttttgagacagagtttcactcttgttgcccaggctggcgtcaatggcgcgatctcggctcaccgcaacctctgcctcccgggttcaagcaattctgcctcagcctcccgagtagctgggattacaggcatgcgccaccacgcctggctaattttgtatttttagtagagatggggtttctccatgttggctggtctccaacttccgacctcagatgatctgcctgcctcagcctcccaaagtgctgggattacaggcatgagccaccgtgcccggccatgcctggctaatttttgtatttttagtagaggcagggtttcacc[133 bp omitted]gattggggcccaccctactgcagtgtgatctcatcttaatatgatttcatctgcaaaggttctatctacaaagaccctgtttccaaaaacaatcctattcgtgggtactggggatcagcctttgaacatctctttttgcaggggacacgggcaacccataacaattttgtacctggaatgtgccttaatatacctgtgtgttctcaacaccagcatataagcctgttgggaggggcctctgcacactgtcgggaggggccgtcccacctcggctcgtttcccattgagggaaggaggcttggtcttagcacggggtctaaggcccgggctttcctcccagctacccggagaacggcgtggtccagatgaactccagggacgtccgagcgcgcgcccgcaccatcatcaagtggcaggacctggaggtgggccaggtggtcatgctcaactacaaccccgacaaccccaaggagcggggcttctggtacgacgcggagatctccaggaagcgcgagaccaggacggcgcgggaactctacgccaacgtggtgctggggtgagcctcgcgtcctggggcgagcccttcctctctcctttcctcccctcccggggcccccggactggctttgaagccgtccagccagcgctgtgtgtgcgaggcccttagcctccggcctggccttcctgcctcccctctggggtctgttcctgctcactgctgagcatctttctaagaccgaccaccttgtgcccctgagtgcctctgcccagggaactgtctctgacccccaggccctgacaggcagagttgtcaaacttcctttttctcatggtgttttttttatcgctctgttgcccaggctggagtgcagtggttcgatctcggttcactgcaagctctgcctcctgggttcatgccattctcctgcctc[173 bp omitted]tgcctggcctcaagctttctttttctctcttgtttgtttcaaatttggtgaataggtcccattcacagggtcaaaatagaaagcacccaagaccacacatgaaggttctccctcctctgcctggtcacccagttcccctttttggcgacatcactgttaccaactttccagggacattctgttcataaacatacacgccaaaccacaccgcttaggagttggcaaactgcagtccacaggcctgctgtggtccgctgccggctttgactaatagttttattgggacgtggtcacacccatttttatcttattacctgtggttgcttttgtgttataagagcagagttgtgtagttgcaacagagactatgcggcctacaaagctgaaaatccttcctatttggccatttgcagaatcattttgcaaagcctgttctttctcccttgcctctttgtgtgtgtgtgtgcgtgtgtgtgtgtgtgtgtgtgtgtgataaaatgtatgtaacagaaaatttaccttttttttttttttaaaagacagagtctccctctgtcgcccaggctggggtatagtggcatgatcttggctcactgcagcctccgccttccaggttcaggtgattctcctgcctcagcctcccaagtagttgggattacaggcgcccgccaccacgtctggctaatttttgtatatatatatatatttagtagagtctgggtttcaccatgttggccaggctggtctcgaactcctgacctcaagtgattcgcccgcctcagcctcccacagtgctgggattacaggcatgagccactgcgcccggccaaaaatttaccattggaaccatgtttaagcgcacagttcggtggcattaaacgcatttacgttgttacgcaaccatctccagcactttgtcctcttcccaaactgaaactctgactccatgaaacactcactccctagcccctgacacctctgcatcctactttccatctctgtgaatctgacaactcgggggacctcctaggaatgggatcacacaggatttgtcctttgcatctgttcactgacgtcactgagtgtgatgtccttgaggtgcatcaggctgtagcctggtcggaatttccctcctttttgtggccgagtgatagtacgtgacgtgttgtctataaacacgagcatcttggcaacggcgttccaagtacaggtacagcaagcacgcagaggtcctgggctgggacatttatggtgcatctgtggcccggtagggaggtcagtgagctgcgggtgatggaggggagtggctggggctgtgggagcctcctcactgagtctgggccttaagcgcgtggctcgggtgtggtgtggaattggtctttattctctgctaggcgcatttctgaatctgagattttctgagaaactatctggattgttatatggaatctgatttttaaatgctggtgactaactttttttttttgagacagagtcttgctctgtcacccaggctggaatgcagtggcaggatctctgcttactgcaacctccacctcccgggttcaagggatcctcctgcctcaccctcctgagtagctgggactataggtgcccaccaccagctaatttttgtatttttagtggagacagagtttcaccatgctgccc[136 bp omitted]ctgccgctgtgtaagatgtgcctgtgctcgttcaccttccaccatgattgtgaggcctccccagccatgcggaactgtgagtccattaaacctctttcctttctaaattacccagtctttattatttagtatgtctttattagcaacatgagaacagactcatacaaccccttccaagctcttgtggtggctgatataatccactactttgcggttgaaggatgggggcttcatttttttttttttaacttggttcttggaggccgcctgcagttcccagggcccacctgcagttccttgccccatgggcttctctgatgtggctactgatgtcaagctagcaagggaggtcttcagctagtcggctagtaagatatagagcatcgtgtgatgtgtcatcgtcccaggagtgacagtccgtcagctctgctgtattttatgggttaggtttaagtgacagccctgtccatacttttatggggagaaacgcctacaaatgcgtggttgccaggaggtgggggttgtggggccaccttaggctccatccgcaccagttatacaccagctgctgcccgtttaccctgagacagataacctgcccagccagcacccacgggcttcctccacctcagtccctcccctagcagaagaaaactgcatttctgcacattgactgtcacaaggcaggggtgtcaccaggcagggaaacgaagatacctggccgaccacaccttggggtgtttgggttcttcgattcattcatgcttgtgtcccgagccctctggggatgcaggaggcacagcgggaaagggaacaggtgctcggtccaggcggccttggggcagacactgtcccttgccagccccatgggagcttccagggatgcagtgagagggtcacgctgagccgagttgtgcctcgcaatgagtttgtgatgtgtgcccatcgttagcaccttcgacttctatcatctgctgagtcaggcatcatacaagatgagacagagaaacgcgattgcagtccctgtcttaggaggcacccagcctggtgtgggagacagatctgcagatgacagaccagggagatgcgtgctctgagacaacacgcgaggatgggtggcagagatggccgagtggactctgggattgggaggctcagataggtggctgagccccaggtcctgctctgggcagtgctaggagctaccagcctttgccagggctgacttctaaatgcaagccctctacactggtgtctctgcagtgtggggggtcaattcattcatcattcattttcattaaattttaccttgcattgtagattcacatgcagttataatgtagagatggctaggcgcagtggctcaggcctgttgtcccagcactttgggaggctgaggtgggaggatcgcttgagcctgggaggttgaggctgcagtgagccgtgatcacaccactgccctccagcctaggcaacagcaagagagtctgcaaaaaaaaaaaaaaagtgaaaagaaaaaaaaacaggctgtgtaccctttattcagtttcccccagtggtaacaacttatattaataaactatactgtgttatcacaactggaatattgacattgatacagtcaaaagtgagtttcctcctcacaaaatccttctcgttaccccttttatagccaaacccacctccccatccccacctggtccctgacccccggcaagcaataatttttttttttgttggagacggagtctcgctctcttttgttctccattcatacaattttgtaatttcaaggattttacaatttcaactttgtaataaggattcccgttatataaatggaatcacacagtatgtaaccttttgggattgattctttttttcccgactctccataattacagattaattgaagttaccgcatatcagtagctcattccttttcatccctgagtagtattctgtggtatagatgggccacttttttttttttttttttttaacgacccattggatatctgagctgcttccaggattttttgctgtttaagatttgtttatttttttgagacacagtcttgctctgtttcccaggctggagtgcggtgatgtgatcttggctcactgcaacctccgcctcctggattcaaacgattctcctgcctcagcctctggagtagctgggattacaggtgcgtatgccagcacacccagcttatttttgtatttttagtagaggtggggtttctccatgttggccaggctgatcttgaactcctgacctcaggtgatccgcccgccttggcctcccaaagtgttaggattataggcgtgagccacttcgcccggccagtttaggatttatttgagtaagttaataagaaacagtggtctgcaattctcttgttttgtatggtctttgttggttggtcaataccagccttataatgtgagctgggaaatgtttattcctttttctgttttctggaagagattgtgtaaaatttacgttaattcttctttaaaggtttgatagaattctttaacgagaccataggctgggtgcagtggccgatgcctgtaatttcagcacttggagaggcggaggtgggcggatcacttgaggttaggagtttgagaacagcctggtcaacatggtgtgaaatccccgtctctactaaaaatacaaaaattagctgggcttggtggtgtgcacctgcagccccagctacttgggaggctgaggcaggagaatcgtttgaacctgggaggtggaggttgcagtgagctatgatcatgccattgcactccagcctggatgacagagcaagattccgtctcggtggggtgggggaggaagggaagctttactgaggccatggagatctggagatgtcttctggaggagcttttatgaattgaatttcttctatgcttatgtgactgtctggactatctgtttcatcatgtttgagctgacatactttctgggttttggggaattagccggtttctctgagcataaagtcatttgtattatttccttattctctgatgcctgaaggatctagtgagatccctgttttattcttggtgttggtaatttatgttttctttttatttttgtcagtctttaccaattttatttttgaggatcttagacctttccctcccttctcatttatttgtacagcaagaataagacagtttttttttgtttgtttgtttgttttgagacaaggtctcactctgtcacccatgctggagtgcagtggcgtgatctcagctcactgcaacccccagatcctggcttcaagcgatcctgacctcaggtgatccactcgtctcggcctctcaaagtgctgggactacaggcatgagccactgcacctggcataagagttttgttttggtcaggtttttttttttttttttttttttttttttttgagataaggtcttgctctgttgcccaggctggagtgcaatggcaagctctcagttcactgtagccccaacctcctgggctcaagcaatcctccaacctcagcctcccacgtagctgggaccataggcgtgcaccaccatgcctgactaatttttttttttgttttttgatgagacaaagtctcgctctgtcacccatggtggagtgcagtggcacgatcttggttccctgcaacctccacctcccgggttcaagcgattctcctgctttagcctcccgagtagctgggattacaggcgtgctccactgcacctggctcatttttttttgtattttcagtagagacagggtttcaccatgttggccaggctggtcttgaactcctgaccttagataatccacccgcctcagcctcccaaagtgctaggattacaggcatgagccactgcacccggccattttttttttttttttttttttaattttcggtagcaatgggggtctggctagattggtctcgaacttttgagttcaagtgatactcctgcctcagcctcccaaaaggtgctgggattataggtatgagccactatacccagtcttagaatatgtttttctttctttttttttgagacggagtcttgctgtttgctgtctcacctaggctagagtgcagtggtgcaatcatagctcactgcagccttgaactcctgggctgaagcaattctcctgccttagcctccttttccttaacacttaatttgttgaggaatcctggtcatttgtcccaggagttccaaatggctctatccagactgtagagatgaccaggagatgtcacttgctgtgtgcgtctgtgctacctgtgagctggtaggtcagtgtgttcccacactgtcccatagccaagagccacctgtgctgtgcttgaaatgtggccaggaggaactggaatgtactgtgagtgtaaaatacacatgggtgccaggcgcagtggctcatgcctgtaatcccagtactttggggggcc[134 bp omitted]gaggca[136 bp omitted]aagaagaatgtaaagtagctcattaataactttttcatattcattccatgttgaaataatcttttgtctacactgggttctatggaacatattccaattacttccacctatgtttacctctcaaacgtgcttattaggaaatttagaattacatacacagcgtgtgttcaagtgctgtttccctcggacgttgctgatggggatgtcggattattgatctcgggggatcagtttcactcacaggagttcttgtattttgatgtaggccattggatcaagcgttgcctttatgattttttttttttttttttttttttgagatggagtcttgctctgtcgcccatgctggagtgcagtggcgtgatcatctcagctccacaacctccatttcccaggttcaagcgattctcctgcctcagcctcccgagtagctgggattacaggcacgggccaccatgcccagctaattcttgtattcttagtagagacggggtttcactatgttggccatgctagtctcgaagtcctgaccctcgtgatccacccaccttggcctcccaaagtgctggaattacagatgtgagccacggtgcccaacttgatttatttatatatttttttgatgagatggagtctcactctgtcgcccaggctggagtgcagtggcacgatcttggctcacttcagcgtctgcctcctgggttcaagcaattctcctgcctcagcctcctgggtagctgggattacaggtgcgcgctaccatgcccagctaatttttgcatttttagtagagacagggttttaccatgttggccaggctggtctcgaactcctgacctcagatgatcggcctgcctcggtctcccaaagtgttggaattacaggtctgagctaccatgcccggccaacctttatgagtcttgcttgtcggttcttgtggatttggtgctccttagccaaaggttcaaactcattcttcccagggcatcctgcaatgaaactctggtt[134 bp omitted]gcctcccgagtagctgggattacatgcgcgcttctccaagctcagctaatttttgtattttcagtggaggcgggggttcaccatgttggccaggctggtctcgaactcctgacctcggcctcccagtgttggtattacaggcgtgagccactgcgccctgttccgtttcatgttgcttctgtgagtgcagctttgattgctagggggcgtagctgagctgttgccccaggcatcccgagaacccgtggtgttcaagtgctgtgagtagatttaggggcctcggcaggccagaatgttccagcgtcctcgttccttgcagggatgattctctgaacgactgtcggatcatcttcgtggacgaagtcttcaagattgagcggccgggtgaagggagccccatggttgacaaccccatgagacgtgagttctgagccagcctttccccatcttccgcggtgggcacggggcgggggctcttgtcccgtctctggcttggccgggccccgccggagctgaccctgccgccccgtgcccagggaagagcgggccgtcctgcaagcactgcaaggacgacgtgaacagactctgccgggtctgcgcctgccacctgtgcgggggccggcaggaccccgacaagcagctcatgtgcgatgagtgcgacatggccttccacatctactgcctggacccgcccctcagcagtgttcccagcgaggacgagtggtgagtgcggccctgcccgccgcggggagaccagagcgccccctacaaatccccagaggggcactgaggagatacaggagaggggcaggcgcgggggctcacgcctgcaatcccagtgctttgggaggccgaggcgggaggatcacttgagctcaggagttcaagagcagcctgggcaacacaagaccagcctgggggacgtagagactctgtttctttttttgtttgtttttttgagacggagtcttttttcttttctttttcttttcttttttttttgcggcggagtctcgctgtctcccaggctggagtgcagtggcgcgatctcagctcactgcaagctccgcctctcgggttcacgccattctcctgcctcagcctcccgagtagctgggactacaggcgcccgcctccacgcctggctaattttttgtatttttagtagagatggggtttcaccttgttagccaggatgttcttgatcccctgacctcgtgatccgtccgtttcggcctcccaaagtgctgggattataggcgtgagccacctcgcccagccttgagacggagtctaatggcacgatcttggctcactgcaacctctgcctcccgggttcaagcaattctcgtgcctc[134 bp omitted]tcagccttccaaagtgctgggattacaggtgtgagccaccatgcctggcctggagaccccatttctacaaaaaatgtaagaaaattagctgggcgtggtggtgctcgcctgtggtcccagccacttgggaggccgaggtaagaggatcggatcgctggagcccaggaggtcgagggtgcagtgaactgtgatcgcgccactgtactccagcctgggtgatggaagtgagaccctatttctttagaaaagtaaaaatgaggtcaggtgcagtggctcatgcctgtaatcccaggactttgggaggc[135 bp omitted]tgaggtaggagaatcgcttgaacctgggaggcggaggttgccgtgaactgagatcgcgccactgcactcaagcctggcgacagagtgagactaagtctcaaaaacaaaaaaaaagggggggtggtgaggaaatcttcccatgttgcttgagtgggtgagacctgcggccagccagggaacagagtgcagggggcttcacagcttctgtgagaggaggtttcgtagccactgtgttcctggcgcacataatgacaattgcggatgtggatggggaggttgtgatgtgctaggctcgggtctgaggacctgcctgtggtcattcctccagcacagaagtgggtgttgttgttgccctgccccccctccccacatcgtagagatggggaaactgagtccacggcagtgagaaggcactcatggaatctgcacgtgtatttcccacatcccacattgcgttcactctcactgttgcaagatccgtggaattctccgtggaaggccaacagagaacctgctttcttttttttttgagatagagtcttgctctgtcctccaggctggagtgcagtggtgcaacctcggctcactgcaacctctgcctcctggtttcaagcgattctcctgcctcagcctcccaagtagctgggattacaggtgcccaccaccatgcccggctaatttttgtatttttagtagagatggggt[145 bp omitted]aagcggcctgcaatgtggacagggcaggatggtagtggtgccaggcggggagagccatgtccgtggtgtgtgggcagagggcacatgttggctgagacatctgccaggctaggcgtgggcagtgacaatcccgacctcgcaggtactgccctgagtgccggaatgatgccagcgaggtggtactggcgggagagcggctgagagagagcaagaagaaggcgaagatggcctcggccacatcgtcctcacagcgggactggggcaaggtgaggcgggtccttcccacgtgcccgtggcccctccccgcctgccagggctcacgctgttgttctttgtgtctgtgcctgggacagggcatggcctgtgtgggccgcaccaaggaatgtaccatcgtcccgtccaaccactacggacccatcccggggatccccgtgggcaccatgtggcggttccgagtccaggtacctgcagcgtcccggggctccaggggccacgcgggctcatcctgcttttctgggggcagtttctcctggctttggccagccaggggtcagggtggttaccagtggtgcctcggctagccgaggaggggtgtggaaagcctgcaggtttgggtttactccttattttaccagggacctgcaatgaatccttgggggtgggggctgctgctctgctcagagacacgtaaggtcattcccaaagctcctgtcccagggaaggggtggcatctgctaagagggacctgtctcagcgctggttgtgatctatcattggggcagcccctgcctgtgactgggtgttgacagtgctgggcgctgtcagctgtgggctgtgtgtcacggcagacgagacactttggcactagtgacattggagccagatggttctctggggcggggccatcctgggcactgcagggtgctgagcagcatctctggcccccacccactccatgtcctcccaagtcatgacaaccagaaacgtctgcagacatgagtgtccccttggaggcaggattgcccctgggtgagatgcactgagctgggtggacaagctgggcctcatcatggagttcatggggccaggcgtgcagggctaggagctcctggggcagcgctgtatccctagtgctcagcggccagccggggccccatgctcaggccagggcctctcaaggcattttgtggagtgagtggcaggctgcacctcaaccggcctaatgaaggccggcttttatatcataacctcatttagaactcagtcacccccacttttattttttttgagacggagtcttgctctgttgcccaggctggagtgcagtggtgcggtcttggctcactgcaacctccctctcctgggttcaagcgattctcctgcctcagcctccccaatagctgggatcacagggacatgccaccacgcccagctaatttttgtatttttggtagagatggggtttcaccttgttggccaggctggtcttgaactcctgacctcaagtgatccacccacctcggcccccgaaagtgctgggattacaggtgtgagccaccgtgcctggccgtcaccccccattttctagaggccgaagaggagcatcggagatcagcagtgaggatgccccgtgcacgcttgatggggctggaattcacgccagctggtttttttttttttttttccatggtgcagctcaactccggccgtctctagccgagcagcacacgtagtaggtgactcgcaggcctgaggagtttggtgtaaaagtgaggccgctggctgctcggggtagggaggaggagggcggtggagcttctctgcagcagtcattgcagaggacaccatgtatatcttggtggcatcctcaggtcagcgagtcgggtgtccatcggccccacgtggctggcatacacggccggagcaacgacggagcgtactccctagtcctggcggggggctatgaggatgatgtggtgagtgtgtgtgtgggaggggtgggggagggttgctctagttttttggatggtggtaaaatacatagaacaaaatttcccatcctagccgtttttaaatgcttggttcccggtggcgtgaagtatattcccattgctatgcaaccatcaccaccaccatctccagaactttctcatcttcccaaactgaaacgttgtctccacgaagcactcactccccaccccctcccagtccctggcaccgcccaacctggttcctgcctctgtgactctgacgactctggagacctcctgggagtggaatcgcacggcctgcgtccttgcatgcctggctcctctcactgagcccgacgtccttgctttgtccatgttgtcgcatgtgtccggattccccttttgttcacggctgagtcctattctgccgtgcggagggaccatgctgtgttgatctgtctgtccgtgggcactggggttccttcccctttcgactgctgtgaatagatctgctacgaacacggctgtacaagtatctccagcccccgttttccattcttttgggtgtatatccagaagtggaattcaagactcctgtgataattccatgttgagtgttgttttttttttttcttttttttgagaccgagtctcattctggctggagtgcagtggtgtgatcacagctcactacagccactacctcctgggctctagtgatcctcccatgtcagcctcccaagaagctgggactacaggcaggcactgccacgccaaactaatttttgtatttttttgtggtgatggggtttcgccatgttgcccaggctgatctcgaactcctgggcttaagcgatcctcccgctgcagcctcccaaagtgctgggattacgggtgtgagccaccatgcccagccctctgtttaagtttcttgaggacgcaccacactgtttgtatagtcgctttgccattctgtagtcccaccaacagtttacaaagggctccaatttccccacattctcaccaacgcttgttattttctgtttctttgaaagtagccatcctggggagtttgctttcaatgcagtctctttttttttttttgcctctgcagagggttcacccagccttcttgtctgtttcaggaccatgggaattttttcacatacacgggtagtggtggtcgagatctttccggcaacaagaggaccgcggaacagtcttgtgatcagaaactcaccaacaccaacaggtttgtggaatcagccttcttatttccttgctgatgcatatctgccgagtcttggttctgttttgggcctcatgtccagcaagtgatagtctcatt[134 bp omitted]cagatggatgaaagcaaacttccctataaaaggccagataatagatatctttttttttttttttttttttttttttttgggcagagtctcgctctgttgcccaggctagagtgcagtggtgcactctctgctcactgcaacctctgcctcctgggctcaagcgattctcatgcctcagcctcctgagtagctgggattacaggtgcttgccacctcgcctggctaatttttgtatttttagtagagatggggttttgccatgttggccaggctggtctcgaactcctgacctcaggtgatcttccctcctcggcctcccaatattggtattacaggcatgagccactgcgcctggctgatagtaggtatcttaatgctgggcctggtggctcacgcctgtaattctcgcgcttcaggaggccgaggctcgaggataccttgagttcaggagttcaagaccagcctgggcaaggtagtgagacaacccatctacaaaaagtaaaaataaaaaaattagctgggtgtgttagcatgtgcctatagtcacagctagtcaggaggctgaggcaggaggatcacttgagcccaggaggttgaggccgcagtgggctgagattgcaccactgcactccagcttgagcaacagactgagatcttgtcaaaaaaaaaaaaaaaaaaacccctccaaaatagattgcttcagctatgcaggtcacacagtctattcagagaacctcttcagctcttgtgtcgtagcacaaaatcagccatagaccatatgtaagtgagtgagcatggctgtgtttcagtgaattttatttgcaaaagtatgtgataggccagaatttgcttggcccctgattacaggatgggggcggacttttccagcataaaaaccatcataaagcccaaaggaaaagacagatttgattatctaaacattataaatatattacataaataaatcctataaattaaaaggcagatgactaggaggagttcttgacatgacacatgatgatagtgtctt[136 bp omitted]cctggccaacatggtgaaaccctgtctctactaaaaatacaaaaattagctgggtgtggtggcaggcacctgtaatcccagctacttgggaggctgaggcagaattgcttgaacccaggaggcggaggatgcagtgagccgaaatcatgccattgcactcttgcactctagcctgggtaacaggagtgagactc[137 bp omitted]tggtgaaaccccatctctactaagaatacaaaaaaaaaaaaaaaaaaaaagcctggtatggtgacaagtgcctatagtcccagctactcgggaggctgaggcaggagaatgtcatgaacctgggaggcggagcttgcagtgagccaagattgctccactgcactccagcctgggtgacagagcaaaaaaaaaaaaagagaatatggaaataatgcacaaaagaagtgcaaagttgtaatcaaatacaaactgaggctgtggtgagatactatttgtttcccctataaagttggccaaaaattctaaaatgttgacataggtcaggggtaaaatagcattccactgttggtagaaatacaaattggaaccatctttctggaaatctcttctgcctgtttgtatgaagagctttataaatgatctattcttgtcactctaactccgctttgaaaaatgtctttaggagacctctggctaggtaaaaatgtaagatgtaatgtttttcataccattatctaaaacaattggcacatagacacacacacacacacacacacacacacacactctcacaaagtcagtaactaagtacctaaaaaagacatgggccatgggtggtgtgtcacatgcctgtcgttccagtactttgggaggctgaggtgggaggattgcttgaggctaggagtttgagacctacttgtgcaacataaaattatgaaaaattaaaattacaaaaaagaatttcaaaaaagttagctggttatggtcgtgtgggcctatagtcccagcttgggagccggaggtgggaggatggcttgagcccaggaggctgcagtgagtaaggcgtgatcatgccattgcattccagcctgggtgacagagtgagacaccctttctctttttgtttgttttttttttatatgtgtgtgtgctttgttttgttttttttgaggcagggtctccctctcttgtccagggtggagtgcagcagtgtgatcgtagctcattgtagcctccacctccttgggctccactgatcctcccacctcagcctccagagtagctgggactataggtgcatgttaccacgcctggctatttttttttttttttgtggagatggggttttgccacgttggccaggctggtcttgaactcctgggctcaggcaatcctcctgccttggcctcccagagtactgggattagaggcgtgagccacggcacctagcaaccctgtctcaaataaatagtaggctgggtgtggcctattttataaattatacatatataactttgaaatattaaatttttttttttttttgagacagaacctcactctgtcacccaggctggagtgcagtggcataatctcggctcactgcaacctctgcctcccagactcaagcgattctcctgcctcagcctcctgagtagctggaattacaggcacgcgccaccacgcccggctaacttttgcatttttagcagagacggggtttcaccatgttggccaggctggtctcgaactcctgacttcaggcgatctgcctacttcagcctcccaaagtgctgggattacaggcctgagccaccactcccggctcctgtgtttccttttttggggggtacatcctcacctataatgcgtggggtcctgactctccctgcagggcgctggctctcaactgctttgctcccatcaatgaccaagaaggggccgaggccaaggactggcggtcggggaagccggtcagggtggtgcgcaatgtcaagggtggcaagaatagcaagtacgcccccgctgagggcaaccgctacgatggcatctacaaggtgagtgccccttgaggaggccgggggctctgtccccgccggggctgcctctgatggagctgacgctgatgcccgctctctgcaggttgtgaaatactggcccgagaaggggaagtccgggtttctcgtgtggcgctaccttctgcggagggacgatgatgagcctggcccttggacgaaggaggggaaggaccggatcaagaagctggggctgaccatgcaggtgtgtctgggatgggggatggcactttgggaggccaaggcggatggatcacttacgttaggagttcaagaccagcctggccaacatggtgaaacctcatctctactaaaaatacaaaaattagctgggtatggtggcgggtgcctgtaatcccagctactgaggtggctgaggcaggagaattgcttgaacccagaaggtggaggttataatgagctgagattgcgccactgcactgcagcctgggtgacagaatgagagtccatctcaaaacaggagcactgccgggctccatgacggctctgacacttcccgcctgggcaccatgtgtcctgcttggaggctgtcatccttgaaggtcattgtgggtcacagaatgggccctgcctgggcttgtggtgctcatgttctggaccgcgctgaacactccaggaggcctcccgtctcgggcccatgcttccctggtttctctctgatccagaataatttccagggccccagctgatggcacccccctagctgtcccatataaatcctccagccagggggtgatgggaacgcgcagatgacatttgcttctccgcctgccgcatctcagagttgaaaaccagacttgcttgtcttcgttctgttggtaaagggatcgctgcagaccagtcaggcatctggtgtcttctgttttcacttcttggctcatcacaaaaaaaaaaaaaaaaaagcagaaacaaaccaaccaaattggtggattccagagagatctggacggaaaaatggggaagatgaatatccccgagccatctctcacctccctgtggcgatgggaactgccgagaacttactcaacaagcggcgcagcatttcagcaccagttaggatgtggtctgtccattgcagggagaagctttacagcagacgaatcgtgagactatttaaggaatcttaattgctgtcgagagcctgatgtcctctacccgagggggtcactcaggttgtcttttgaatggatttgtacggtggggaatttcagaagctgaggaagtagagagaaaaatagtaatgggagagacagcctcagcttctgttgggagtaggattttttttgtttgtttgttttgagatggagtcttgctctgtcgcccaggctggagtgcagtggtgggatctcggctctctgcaacctctgcctcccaggttcaagccatactcctgcctca[134 bp omitted]ctgcctcccaaagtgctgggattacaggcgtaagccaccgctcccagcctttttttttttttttttttggagacagagtctcactctgtcgcccaggctggagtgcaggcatgatctcggctcattgcaacctccacctcccaggctcaagcgactctctcatctcagcctcctgcatagctgggatcacaggtgtgtaccaccatgcccagctatttttgtatttctagtagagacggggtttcgccatgttggccaggctggtgacctcaggtgatccacctgcttccacctcccaaagtgctgggattacaggtgtgagccgctgaccctggccaggattttttttttttttatgactctcatctccattgtaacataaagaatgtgaaaggagctcaaagatttcctgagacactggagagtcagacgtgacttataggtaccttcgaaatggagcgatgatgccctgtgaggacagagagggcccgagtcctcagaatcaccagagtttggccagctaaggccctggggtcaggtgttcgtaagtgaagtttctggggaaacagtcatgctcattcactgaagtagcctgctctcagcgcttgcagtccagacccataaggcttgaaaacattcaccctagggtccctggaagcaaaagtttgcctgccctcatggaaatcgtaaagacaacgagatcttattggtgggatgtgatgctgaacacgtcacccgcgttcgctcacattaaatgcgcttaccccgaccctgccaggtggagcttggccgattatctcctcttagtctcctcttgttcgtagtgaagctttgcgattagacaggattagccattggtcgaggctccacagttaacgaagagctgaatgcacaggcgtcccccccttaccagggggacacttcgaaggtcctcagcacatgcttgaaaccagagagtaccaaaccgttgatgtataattttttttccatacgtttggactggtgattaagtttaatctataaattaggcacagtatgagattcacaacctctctttcgcatcttaggcttctctttagcatttccaaattgtcagcatccctactcttgcactttggggccattatttttatttttgagaccaggtctcgctctgttgtccaggctggagtgtagtggtgtgatcatagctcactacagcctcaaactcctgggctcaagtgattctcctgcctcaggctcctaagtagctgggactacagatgcacaccaccaggctcggctaattttttaaatttttttgtagagaggggatcttgctatgttgcccaggctggtctcaaactcctgggctcaagcgatccccctgccttggcttcccaaagtgttgggcttatttaataaaaattagaatgtttaatattaatattttatatttagcctgtaatcccagcattttggatgactgaggcaggtggatcacttgaggtcaggagttcaagaccagcctggccaacatggtgaagccccatctctactaaaaatacaaaaattagctgggtgtggtggcgggcacctgtaatcccagctactcgggaggctgaggcaggagaatcgagaagctggacaaagggaaggttcacatccctgtgggacgatgcaatgtttcatcatgcagtgtgcgtgatgtgaggtggctgtaaagggggaggaaggggccccgagccgagggatgcagcgcctctagacgttggacacttagaacagtgtgcagtttacaacttaggaattgtttctagaatatttcatgtaacattttcagttgactttgggtcactgaaacctcagcaaaactagataagggaggactaccctgtgctcttcagggggattgggggtcaggtgtgtctggaaacccagacctggcaaggaggctggaagagcgggctctgcatagcgtgtgggccccaagcctgactcacggctgtccctcttcctcctgaagtatccagaaggctacctggaagccctggccaaccgagagcgagagaaggagaacagcaagagggaggaggaggagcagcaggaggggggcttcgcgtcccccaggacgggcaagggcaagtggaagcggaagtcggcaggtgagaatctcgtgggtgtggggtgagcgtcttgtgtgtgggggagcaggtgggcatctcgcgggtgtggggttgaggtcgtgtggacgtgggagccggtggctgtctctccggcagctcgggccacgcgcccctccctcacgcgccccaccctcttccaggaggtggcccgagcagggccgggtccccgcgccggacatccaagaaaaccaaggtggagccctacagtctcacggcccagcagagcagcctcatcagagaggacaagagcaacgccaagctgtggaatgaggtcctggcgtcactcaaggaccggccggcgagcggcagcccggtaggctcgcacggctcactcgtcgccctgatttgcgttgactgcggtaaaatgtgtggggcttgtttcccatgttccccattttcaagtgtacagctcagtcgcactgagtacattcttgtggttgtgcaaccatcaccaccatcaccacctccagaactttatcctctccccagactgaaaccctggccctgaaactgtcactcccaccccctcccaagccttggcactcgctccccagccccggcaactgctccccagcccctgcacccgctccccagctccggcaccccctgccatcctaccttctgtctctgtctcccggggctgttgcaaagtgaccccaagcctaggagtgcaaagcgactcacatctcacagctctggggctgggagcccgacatgggccttgctgggctaaagtcagggcagggatagggctgggccctcctgggggctccaggggagaaccagatttctgcctttcccaaggtctagaggcactgtatccctcggctcggggccccttcctccccctttacagccacagcgcatcttcttccagtctctgagtctcactctcccgccctctctcgggaggacctcggggtgacatcaggccccccgcctcacccaggatgctttcccagctccaggtccttcactcagtcccacctgccatttctcctctgctgtggatggtgacgtctcaggatggtgcaggtctcaggattcagctgtggccgaggccatctcagtggtccctctcttcccatttccttcaggccacattcttcccagggctttctccccagctcccaccctacgctggggcagccccttgcccctagaccttcacttgtgtctctttggtccccgcacttagctccaagcaggaggaggtgtctttcgagtcatccgaggctgggctcctggtggcccgtgtactcagtatgcattgtgtcagtggacaccatgcctctaaatttttttggtgacaggagctcaccctgtcacccaggctggagtgcggtggcatggacaaaggtcactgcctccttgaactcccaactcccaggccacgcctatgtttttaatttattttgtttatttttattatttttttttgagatggagttttgctctcgttgcccgggctggagtgtgcaatggcatgatcttggatcactgcaacctccaccttccaggttcaagtgagtctcctgtctcagcctcccaagtacctgggattacaggcacccaccacgcctggctaatcttgtatttttagtagggatgggatttcaccgtgttggtcaggctggtctcgaactcctgaccttaggtgatctgctcacctcagcctcccaaagtactgggattacaggcgtgagccaccatgcccggcctattttttaattttttgtagagatgggggtctcactgtattgccgggctggtcttgaacacctggctcaagcgatcctcttgtcttggccttccaaagttctgggatgacaggcgtgagctgccgctcccagccaggaacctctcctaaagccctgtcttgactcagtgcagggtgtgcttggtggtgccagctggtcatatctgggtcctgcccagcatcattgaggctggcgcccttgtactggctccgcctcatcctccccaccttgccacttggggtgttggggacttcaggtgaggctcatgcctgttgggcctctgtttttctcagaacggggacgatcatggcccccgcctcctggagtgaaggctggggacagaattagaggacccaggtacatgctcagcaggaagccactgatctgtgggagccctggtcccggtgtctttgccggcctcacacccgcttccctctagttccagttgttcctgagtaaagtggaggagacgttccagtgtatctgctgtcaggagctggtgttccggcccatcacgaccgtgtgccagcacaacgtgtgcaaggtgagtagagatggccgcgggagccgggtggaaggttctggaaggatgacctgacctcccgttcccacatgcctgccactacagacagaggcttgttggctttgctccgctcactctgcagcttttctcggggccctgttgactgctttctgggcagcctgtattaccacggaggcctataacattctcccccaagtcctgtatggtcaaggggccagggtgggagaggatgggccacagtcttggcctaaggtctggagaggaggtgcacatcccctaggggtcaggaaagaaggcttcttggaggaggtggtgttaccaggcagcatcccttgtacctgggacagcaggtgaagaagcctgggtgggaagtcagcagctggggcctgcagtggctctgggcactggggtggtggcctgccatgggctttaaactcaggacaagtggtcagtcgtaggagggacacaagatcccagctgatggtttttttttttttttttttttttttttctgag[133 bp omitted]cgtgcccggctaattttttgtatttttagtagagatggggtttcaccgtgttagccaggatggtttcgatctcctgaccttgtcatccacccgccttggcctcccaaagtgctgggattacaggtgtaagccaccgcgcccaccccgcagctgatggttttcaaaccgattggtttggggccaggacagggtctcttcccccctgtgctgtgggccttggggctggatcattgtctggggtggggccgtcctgggcactgcagggtgctgagcagcatccccggcccccacccactccatgccaggagctccctgcctagtcgagacaatcacagacatccccagacaccttccagtgtcccctgggggcagaactgcccaggtgggcagtgtgggtctgggtgatggtttctctgctgcaacctctggccagagccggcagtcccggtggacaggtgtggaagggactgaccctgccaccccacggatctccccaggcttctgagttgctggcggttttccttccaactgcagtcccgcagtcctctcagccatgggccacacccccgggtctcagaccccgtgtttgttttcatgccaggaggcagctcagggaaggtcaggagatggggtgttcccagtcatgcccatggcatctctgcctcctcgggccccacctgcctcgccctgtggcctgagtcccttcagctgtgtgggcctccctgagtgccctgagtgaggtggcagaaggggtgagaggccatggtgtctttggggctggtggtccgggtctggccatctgtcacctctcaggcgtgcaggcactaatccctccaagcctcagttggccacagtgagaaggggcctggtaacactgtcctggatgccaggttgttgtgaaggtcccggcttagcctctggcaggaaggaggtgctcaggaggtgggcacaggcagagggctggctgtggggggctattggaagagggaggcctgggagccccgtggcggtaggaaggactgtggggacattggaaaccatctgtcctgtgcatcggtgtgaaggcgcggaagcgctgaggatgtgaaggaaggggctaaccagcatcacggtgtccccacaatctgtccttgttgctctgttccaacttgggaagctcagcatcggaggggttctgggaaacaggctgtgaccttccaccttgatctttttaaattataaacttgaggccagccgtggtggctaatgcctgtaatcccagcacttggggaggctgaggtgggaggatcacttgaggtcaggagtttgagaccagcccgggcaacatggtgaaaccccatctctactaaaaattaaaacaaaattagctgggtgaggtgacaggtgctactcaggagactgaggtggtagaatcgcttgaacctgggaggtacaggttgcggtgagctgagatcgcgccattgtactccagcctgggcgtcagagcaagattctgtctcaaaaaaaaaaaaaaaaaattgaaaaaaacattcagagacagcatctcactctgtcgcccaggctggagtgcagtggtgccatcatagctcatcgcagccttgaactcctcgcggggctaaagagatcctcctgccttagcctcctgagtagctggggctacaggcatacaccaccatggccaacatgatgaaaccctgtctctactaaaaatacaaaaattagccaggtgtgctggtgggcgcctgtaatcccagctactcaggaggctgagac[139 bp omitted]tgactgtgctgtggtcaccaggcctctcccccatgtggtcaccgccctcgcccagctgtgtgacgacatgctgcagacatgtgccccctgcgtaggcatctgtgcacctgtgtacggcgtgtcactcctccctggcgtgcagccagcccggtggcatcttccctgtttgtctgcttgggaagtggagactccaggcctctcagctctgtcttctcctggctttcttccccaggcacgacttggttgattgagcttgaagttaggaatctgaatccaccagacttggttccttcctccttttcccctttcttctcattgacgtgtatgtttattttttatttttttcgagacaaggtcttgctttgtcgctcaggctggagtgcaatggcgtgatcatggctcactgcagcctcagcctgcctccctgggttcaggtgatcctcccacttcagcctccggagtagccacgcccggctaatttttttgtttttgttttttctttgagacgcagagtcttgccctgtcacccaggctggagtgcaatggcgtgatctcagctcactgcaacctccgcctcccgggttcaagccattctcttgccttagcctcccaggtagctgggattacaggcatgtgcctggctaatttttgtatttttagtagagacagggtttcaccatgttggccaggctggtcttgaactcctgacctcaagtgatctgcccccctcggcctcccagagtgctgggattacaggcatgagccacgatgcttggcctgatgtgtgtgtttattaagcatctactgtatacactgtgcttggtgttgagagagaacacagcctcaaagctcagggagcatctgccctgttgtagataagataagcacattaataatatataacacggctccacaggtggaaggagaggtgccgtcttgaaggcagatggggtgaggggatgggactgcctctagggaggtgtcagggaaggccccataagggaggtgacttgagctgagctgtgagtgatgagagccgggggaccgagctgttaagctgcatgacctgccagggacaaaagcctggaggccgggtgagcttggaatctttgagggcccctaggggggccaggctggtgatgggcagcaggtggaaagtgagactgaaggtcagaggggcctctggacctggtgagactgtccccacagtcctgggagaggtggccaggagcaaacctgatggtgtggatggcacttctcacgcgcctgctgtgtcttacaggactgcctggacagatcctttcgggcacaggtgttcagctgccctgcctgccgctacgacctgggccgcagctatgccatgcaggtgaaccagcctctgcagaccgtcctcaaccagctcttccccggctacggcaatggccggtgatctccaagcacttctcgacaggcgttttgctgaaaacgtgtcggagggctcgttcatcggcactgattttgttcttagtgggcttaacttaaacaggtagtgtttcctccgttccctaaaaaggtttgtcttcctttttttttttatttttatttttcaaatctatacattttcaggaatttatgtattctggctaaaagttggacttctcagtattgtgtttagttctttgaaaacataaaagcctgcaatttctcgacaaaacaacacaagattttttaaagatggaatcagaaactacgtggtgtggaggctgttgatgtttctggtgtcaagttctcagaagttgctgccaccaactctttaagaaggcgacaggatcagtccttctctcgggttctggcccccaaggtcagagcaagcatcttcctgacagcattttgtcatctaaagtccagtgacatggttccccgtggtggcccgtggcagcccgtggcatggcgtggctcagctgtctgttgaagttgttgcaaggaaaagaggaaacatctcgggcctagttcaaacctttgcctcaaagccatcccccaccagactgcttagcgtctgagatccgcgtgaaaagtcctctgcccacgagagcagggagttggggccacgcagaaatggcctcaaggggactctgctccacgtggggccaggcgtgtgactgacgctgtccgacgaaggcggccacggacggacgccagcacacgaagtcacgtgcaagtgcctttgattcgttccttctttctaaagacgacagtctttgttgttagcactgaattattgaaaatgtcaaccagattctagaaactgcggtcatccagttcttcctgacaccggatgggtgcttgggaaccgtttgagccttatagatcatttacattcaatttttttaactcagcaagtgagaacttacaagagggtttttttaaaatttttttttctcttaatgaacacattttctaaatgaattttttttgtagttactgtatatgtaccaagaaagatataacgttagggtttggttgtttttgtttttgtattttttttcttttgaaagggtttgttaatttttctaattttaccaaagtttgcagcctatacctcaataaaacagggatattttaaatcacatacctgcagacaaactggagcaatgttatttttaaagggtttttttcacctccttattcttagattattaatgtattagggaagaatgagacaattttgtgtaggctttttctaaagtccagtactttgtccagattttagattctcagaataaatgtttttcacagatagacttgattgtgtcttcctatttgcaaactgcctttggagctttctgtctacttttgtgcactattttacaaaaatcccaggagaaacatgaggcaggtggcttcagccccactttacagatgagaaaactgagacccaggagatgacggtgacgggctgaggtcctaaccgcagcctgggaggtgctgggctgttcactttgcagcgtcaagttgcaggggtcagcaaacgacagccaatgggacccaagtcaggacactgcctgtctgtaaataaagttttattgacaccaccacacccatttctttatgtatatagtggcgtttacgctaccatcagcagaactgagtaggtacagcagaaaccatctggaccacaaagctgaaaaatactcactgcctggccagcaaagcttgctggtctcttctcttgggaggatgacttgagtgtaggagtctgagaccagcctgtagaccccaactctacaaataaataaaaatattagccaggtgtggtggtgtgtttctgtagtcccagctactcaggaggttgaggcaggaggctgattgcttgagccccagagctagaggctgcagtgaactttgattgcaccacggtactccagcctgggcaacagaatgagatgctgtctttaaaaacgttttaaaaaaaaaaaatcgggacggtaaaggggctgcgtcttgcagattaattaattcacatcaacctattactggtgccttttattgatggttaagtaaccatatgggcagatttgttttgtttttgagacagtcttgccctgttgtccaggctggagtgcaatggtgtgatcacagctcattgcagcctccaactcctgggctcaagtgatcctcccatctcagcctcccgagtagctggtaccacaggcatgcagcaccataactggcaaatttaatttttttttttttttttttggagagacgggatctcattctgttgcccaggctggtctccaactcctgtgattaggcgatcctcccatctcagcctcccaaagtgctgggattacagacgtgagccaccacgtgcagcctggagtttctttttgaggtggtaaaaatgttctaaaattgatggttgcacatgtctgtggatatactaaaatccacagaattgtgcactttattttttatttttattttttcctttttttttttttgagacggagtcttgctctgttgcccaggctggagtgcagtggcgtgatctcggctcactgcaagctccgcctcccgggttcacgccattcttctgcctcagcctcccaagtagctgggactacaggtgcccgccaccacacccg[180 bp omitted]ttataccagaaatatgtcaagtgtgaacgtgaagataagattcccagttcttgaaggaaactccataaatgtccccagtgggcccttcctagaaaacactaaagtgggttcattgttgagattgctgccttctttttgatttttctctccctttaaagaacaatgtcatgtttaaaaaaatgagcaaaacccagaaaagtatttgtggaactgttttgccaccgactctaatcttgggcatatttctttcctggttcacttaaaaaaatttctttggccgggtgcgatggctcacacctgtaatcgcagcactttaggaggctgaggtgggcggatcacctgaggtcaggagtttgagaccagcctgtccaacatggtgaaaccccatctctactaaaaatacaaaaataagctgggcatgatggtatgaacctgcaatcccagctacttgggaggctgagacaggagaatcgcttgaacccaggag[144 bp omitted]gtgtcatcatagctcactgcagcctcaaactcccatgcgcaagcaatcctcctgcctcagcctcctgagtagctgggactactacaggtgcaaaccaccatgcctggctacttttttaaagagagagatatatattttagtagagagaagtctcactttgttgcccaggctggtctggaactcctggtctcaagccatcttcctgtctgggtctcccaaagtgctgggattacagatgtgaactaccatgcccaccctaaaaatctttaacagctctatggagataacagttcaggtaatataaaggtcacccttttaaagcatacagttcagtggttttattttactgtgttgtttttgagacagtctcgctctgtggcccaggctggagtgcagtggcaagatctctgcttactgcaacctccccctcccgagttcaagtgattcttctgcctcggcctcccaagtagctgggattacaggcatgcaccaccatgcccgcctaattttcatatttttagtagagacagggtttcaccatgttggtcaggctggtctcgaactcccgacctcaggtgatccactcgcctcggcctcccaaagtgttgggattactggtgtgagccaccatgcctggccagcttagtggttttagtatagtcaatacagttatgcagccatcaccaccatctaattacagaactttaacatccacacaaaaagaaacctcacacccttccgcagtcttgccctgtgtccctcccccaggccctgcaagccacgaatcctctttctatccttatggatttgcctgtcctggacatttcatataaatggaattatactgtattttgtgtctggcttctgtcactaaggatggaattttcgaggttcatctgcattgtagcctgtgtcagagctttattccttttcatggctgagtaatattccactgtacggatgggccacctttctataatccccgtttgacttgttttaagatgtagtcttgctctgttgcccaggctggagtgcagtggcataatctcggctctacaacctccacctcctgggttcaagtgattctcctgcctcagcctccggagtagttgggattacaggtgtgcaccaccatgcctggctaatttttttgtatttttggtagagacggtgtttcaccatgtt[133 bp omitted]ggcccaggctggagtgcagtggtgtaatctcagctcactgcagctgcctcctcctggattcaagcaattctcgggcttcccctctctagtagatgggactacaggcatgcaccaccacacctggccgatttttgtactttttgtagagatggggtttttgccatgttggccaggctggtctcgaactcccgggctcaagtgatcctcctgcctcagcctcccaaagtgctgggattacagccactgcacctggcctcccatttcaatttgttaatgcagcagaccaacccataaggggaggggcatctattgaagcattgaacatttttgcgctccacaccttgcctgtctagaaagattgagggagaccagtcagaaattgagcattgggcctgctaactgggggttccttgacgtctgaaagccaagccaagcctcctggtcttgtttagggggaggtccccaagcattccctgccccagtcctttgtgagatttgcatctgactgcaaaggatggaagaaaaccagggcaattaggtgagtgttgcctaaattaatctgcccattaaaatattctaaagagcatttccttcctttttggaggatgaggacttctacttatctgacagcaattctagtgtgtttttaacattttaatatgaagagtttccaaaacttggaaagaatcggatttggaaagaatcggatggtgaaccctcagacctaccgtctagattctatgatcatgttaagtttttctcataagagatggcatgaaaactttgtctaagcaaaataaagtggagaacccatttgggttcctcggttaaaaacatttatattgtctgtgaaatctaaacaccccccactgtctcagagaatatacttggaagtagaacaaaaagccctatgtatgtggtacgtggggtggggactctttcccttcatgattgcacttttttttttttttgagacagggtctcattctgttgcccaggagtgcagtggtgtgatcatggctcactgcagcctcgacctcctgggctcaagtgatcctccctcagcccccagtgtagctgggaccacaggcatgtgcccgcacaatcaactcggtttttatttttagtagagaagaggtctcgctctgttgcccaggctggcctgaaactcctgggatcaagtgatcctcccaccttggcctcccaaagggctgggattacagatgtgagtcactacacccagcctgggcaacagcctgtttttaaattttgtttttactttttattttgagacggggtttgactctgtcacccaggctggagtgcagtggtgtaatcaacggctcactgcagcctccacttccccgggctcaggtgatcctttcgcctcagcccccgaatagctgggattataggcgcgtgtcaccacgcccaacttttgtaatttttttggtagagacggagtcttgctatattgcccagcctgttctcaaactcgtgggctcaagtgatctgcccatctcagcctcccaaagtgctgcgattccaggcatgacctgaaattaaatctcaactccatgtggaatatatgaatatggtcccataagaatttaaaacacccagagcttcttaaattctcctttgacttctctttttaccagtgtgcagctttccttctctccccaaggattaagttcgtttcttcagtttaggagtacctttttctgtgcattgacaagcttgtgtgctcttaacctcatgataccggtttctgtgtgtgtttccatatttattttattgagtacaggattctggaccactgtccctagctcagcggttgggagatatttcatgtttgcaaacagatcggccttctcttttttcttttctttccttttttgagacagagtctcaccctgttgcccaggctgaagtgcagtgatctcgactcactgcaacctccgcctcagcctctggagtagctgggattacaggcatgcgccaccatgcctggctaattttgtatttgttaatagagacaggtttttgccatgttggccaggctggtctcgaactctggacctcaggtgttccacccgactcgacctcccaaagtgctgggattacaggtgtgagtcgcccgagccacagcaccgggcctggcctccttttcaattgctacatagtaagtattccagagtactgattgctattaagttacttctctaatcccccactgatggatagttagtgcaaaacattggaaacagttgcagacagccctgccgccggcattcttgaattgtgtaagctccagaccttttttctgggtacatcacctccaggaagaactgctggctgggttatcgggtggtggatgcacttagaatgttattagaaaatgtcaaattgcccaatttacactcctgccactccaaatgggggcatgcctcacacccctgcgtggtccagtacacaatgaatgctcattttgtgaagtcacagggtcaaatctttctccgtgcctcatcccacttaatccttgcaacattctcaagaggcgggtagacggggtgtggccactaccatcatatccattgcacagttggaaacagactcagcgaggttactttgctggaggtcaaccacagtgaggcatggggcccggcttagctttgaatccaggtcagaaagcaccaaagctcattctctcccatacattttagggaactcggggagagggaccctaactattccgaaggccttgccccttggcaaaggtttgttgattgtgatgggaatagacctacggtggcggggtggaggctcttgctgctttaccctatgttctcggttctcctcctttgcaaaacggatcgctatgtctccttgcttggcactttgcaaattggggaacgctaagcccacattccggccacgggtttcgaacctccagcctgcacgttcccggccggtgctgatgctgtgctgggtctcacgtactcagccgccgcctgataaccagggcggggcccggagcttgcgggcagtgattggcacctgccccagcctgtccgcgcctcgggctggcccctcaagccaatactggctcctctctgtgcggtcgtcgggcgggccctgaggctcccttgtcaatccaaggcccagctgccgtcgggttggtcgcggcagccttggctggcgtgcgccccctccaatgagaacagagccggtcagcgggcacgtgggtgggcgccggcgtgtccccgccggtctgccaatgaagaggcgaggccggcgtttgtccccgcccaatcgcggcgcgcggtgggcgggccgtgcggtgttgatgggcccggcggaggggaggggcggagctgtcagctccggccaatgggcgctcgggcgtggatccggcagccaatggcagtcggggcggagctggcgcgcggccttataagcccccccgcgagcgcttgcggagggctcggtcgccagcaaccgagcggggcccggcccgagcggggcctgggggtgcgacgccgagggcgggggagagcgcgccgctgctcccggaccgggccgcgcacgccgcctcaggtgagcccacggggaggccgcccggccgtgtccgagcgcggaccccgccgccatggccgcccccgcgtcgcggctcggggctgcgggcgcgcccgggactcgaggcccaggcctcgggcgcggcctgctcgggccgggcctcgcgctttgtccgggccggcggggcggttggggcgttaaccgcccggcccgggggcgcccgctggttttcgggcgggggcggcggggccggacaatggcggggcgcgcccaggggcgggagcgggggccccttcccgggccgggggcgcgcgggggctgggcacagacggccccggcgccccgcacaaaagatgacagcgtgggtggccccggccgggcccttttatcacccgggacaagcctcggcctattattattattatttttgaaagaaagcaagaaaaaggaaaaagaccccagcccctgggtaacccccgcctgcgtttctggccctttgggcgccaggggggctaaggggaagccccccagctggacacccagggatgccccctaaatgcctatcattgctcctgcactgcccccacctccggtcaacctgctatgccttggtagcttccaaacttgcccccctgtacgtacccgaaacccccaccccgccataagcatatgcaatctggattttagaaaaaaatcatcttgctatgcaacggcagcctccacgagtctctccgtccctcccccttccagcctgatcgccatctcgaacgaagcccctgctctagagaaatgaattgaggagttgcttccgccgagaccccttttctgtgtcccccgtggacatccccctgggagctggggacggactcgctctgaaatctgcttgacctggggtctgccagggcccaggtctgcgctcagtggtggccatgacaatcaggcaggacgggggactctgtccacctgggcacggtggaaggttttaaggggcatgttttccgcccctgggggcagtggaggcatggactgcttttgggtgcatcccatctgtttgcttgggggaggatgcttctgttttaataatttaccagcaccctgtgaggaagtgttccccgagttgtgaaactagtgagaaggtggttcagctccgtggagcctagtgatcctgtcatatgtgaagagcgtctttttccatgtgtttctggctggggcgtgtattcagcaagttcctttgggtcccaccgggtgcctgcactgtcttgggatctctggatactggactgaattcaagggatcggtgccctgccccagtcctctgcctcaatggccatttatcagaatgtccccgggctggagaatgctcctaaaaacagcaccagtcctaaagcaggctcattagacgactcctatgggcttttatcactgccgttatgggagctaatgactcccctaattctccaataatagcttccttatgagccaccaggagggtttgtcaacacacggggtcagccttctcctgcagcccctgctgaagcagtgggcatcctctctccgctttgcagtttatgttttgaaaccctgaaggtcggagcgtaaagccgtggtagagtcaacttctgtctgagccgaggatttctgggacttgccagcctcgtctccgtgtgtctgattggacacctggcaggtccgggcgctccccctccttgagccggcgacaccaggacgggtcagactgtcctggcctagaggaggtcaccgctggggaggaaaagggggtaacggagattctgccgcacagacgggtgtctgtgtacaggctgttttggtggaagcgtctactgtgtcaggagctgcgggtgcctgcgtgtgcacgtgtgtgtttagttgctgagacctgaaatatatatgtcttagtaacaatccgtttgctcgcattttctaaccctttcctctttggggagggggctgctaacaagatgttaactgctggcgcttaaaggtatagctgatcagccaccgcacagcaccccgcctggcctttgttgtacttttctgtctcgtggaagagacccttcctcagcctcctgccctgtcttcagtccctgtcccgtcctgcaggagccctctggggtggccaggggccgtcctctgtgtccttctctcccacctgaccactctgcctgtactttaattcctaatttctctgtctcctctgctggtttcctgcccgtttgtcctatgccccacccactccctgatgagccggggaggagcctcagctctggggaagccatctgtcctcggttccatctgacacctgtggggacgtgccttggggtcatgcgttcacctggtctggggctgctaggtttccagtgccgagtgccatgccgggacaggttgggaggagtccctggctcctgtgggtttagagtgtagtgggggaaagggtgagctggctgcccagggcctggtcacagctggaatggtggtgtgcagtccgctgccctcgggcccagctcagggagcaggcaggaggaggcgaggctgttgagggcctgaggtgcatttgtaggtggctttgttccctggatcggggagcggaattgggggttcagagctgggtgaccttgacccagtcacttgctcagtgacaaagcagatcgggggcactaaatctttcggagcccactgggcaggaggggacggagagcagatgaacagggtgggggctcggggcggggggagctccgcaggcctgcactggtcaccgccatgacagatcggccgtcctcatccacagcctcaccctaggctcctggctcagctccagggacctgccatgaggcagctcgatggggtcttcagatgccacagccctcccccttcctgccccaggggtctctgttcctggcttaggatgccggacagaagagcaggggcccagcctgggctccgttctcatctggtggtcttgacgacgtctctggatctctgccctctgtcccatgccccacacaggcttcagagttggagagacctggattcagatccctcctctgaggcagtcacttcccctctctgggccttgctttcttctctgtaaaatgggtgtaatgggaacacctccctcccaggtggttgtgaggatcaaagcgggtaaaaggcgctgaagcttgcagggtgccaggagctctgagttcggagccggtttattacacagcaaggccctctgccctgtcagggtctccccacctctgccctatccacgttctgggctgggacattctgtggcggggctgtcctgggcaccgtagggtgagtgtgaacaatatccctgaccaccacccaccagatgctagtagcaccctgtcccctaagcggtagcaaccaaaaatgtcccctgggaagcactgtcaaccccgcagtgagaaccttggacttggccttcagccctgcagtagctcatggtgtgctgtgaccgtgatgggcctcagctccctttctttcctccccactcaccctttagcagtgagtgactcctatttgcaaactgtgtcccggacacactcctcacctggttgttcaggttctccgtgactgtccttctgcccttccagggtggcagcttccacctgagaggacaggagcccccacggggtcccctgcacgccctgcaatgaggggcagcccggcatctgtggggtcttctgggctgctctctggcctctgagctccgggtcttcctgggctgctctttggcctctgagctttggcaggtccttgcccaggcttgcttggctgcccccaggggtggcacttccacaccctcccagtcaccatagccctgacctgtcgatttgccagacagttttctttaagtccatttaaaaatgactcacctctttgatcttggcctcttcctgaacagtaatgtccccagagttgtggaacgttaatgtgctagttgcacatacttttatttatttattttgagacagaatctcactctgtcacccaggctggagtacagtggctagatctcagctcactgcaacctccgcctcccgggttcaagtgattctctggcctcagcctcccgagtagctgggattacaggtgcccgccaccacaccctgctaacttttgtatttttagtagacacggggtttc[133 bp omitted]caaatgagcttaaccactatattaaaaaaaagaaaatttgtatcttcccaaatactgaggggggagtggattgacgaattgatgtttcttggtttttggacaaattaattttcaagctcactccctgcgtgactggcctgttctaggatgctggacttggttagatctgggtccgtctattccctcctgctcccttgaggagctcggaaaatggccttccctgttggggcggggaacatgggaagtctctacctcctgcttagttttgctgtgaacctaaaactgctctctgaaacaaagcatattaaaaaaaaaaaaaaaaaaaaactggctgggtgcggtggctcatgcctgtaatcccagcactttgggaggctgaggcgggcggatcacctgaggtcaggagttcgagaacagcctggccaacatggtgaaacctcgtctcttctaaaaataaaaaaattaactgggcgtggcggtgcacacctgtagtcccagctacttgggagactgagacaggagaattgcaccgagatcctgccactgcactccagcctgggtgacagggcaagactccgtctcaaaaaaataaataagtggccgggcgcagtggctcacgcctgtaaagccagcactttgggagccaaggcgggcagatcacaaggtcaggagatcgagaccatcctggctaacaccgtgaaaccccgtctctactaaaaatgcaaaaaaaattacccgggcatggtggtggccggtgcctgtagtcccagctactcgggaggctgaggcaggagaatggtgtgaacccgagaggcggagcttgcagtgagttgagatcgcgccactgtactccagcctgggcgacagagcgagactccatctcaaaaataaataaata[131 bp omitted]ggccaacatagtgaaatcccatctctacaaaaatacaaaaatcagccgggcatggtggtgggcgcctgtagtcccagctactcgggatgtgggggcacgagaatctctggaacctgggaggcagaggctgcagtgagccaagatcacaccactgcactccagtctgggagacagagcgagactctgtctccaaaaaaaaaaaaaagaaggtagtcaaaggagtaaaaaccaaaacaaacaaacaaacaaaagattttcccctgctcagaaccttccggtgacttcctgttgcccttgggaaaaattctgggccctttcgcgtggccccttcgctctgtcatctgtggccttgtccttccttcctttcctccctttcttcctcctgcacctgctcctttcctggcacagccgccttccctgcccgcccttccctgccgcaggacctgtgcacttgctgtgcccgctgcctggttctctttccacccagccggctccttatcactctagtcacttcccttccctacttctcctcctttgcatgtcacacgatcagagctgggtattagtctgtttgtgtatctgtttgtctcatctactagggcaggggctttttctggaagggccggagaataaatatttttggctttgtaagccagaggtcatctctgtccagaccactctgctttgccgttgtagcaagaaagctcccgtgggcgagtgtgcctgtgtttcagtaaaactttatttatggacacaaacgtgaattccgtgcaatttttacattataagacatttttcttcttttgctttttttttcctccaacgactaaaaaatgtcaaaaccattcttagactgcaggctgtacaaaaacaggtggcgggcaggattgaacctgtgggttgtagtttgcaaatacctggctagggtgtgagggccacactacggaaagctatggaaaccatgtcagcctcacgacccctagaatgtacggcagctccttagacgtggtgggtgttgagtggacattccttgttgagtgaatgaatttttttttttttttttgagacagagttttgctctgtggcccaggctggggcgcagtgggctgatctcggctcactgcaacctccacctcccggattcaagcgattctcctacttcagcctcttgagtagctgggattacaggtgcatgccaccacgctcgactaatttttgtatttttagtagagatgggattgcgccat[264 bp omitted]gaccaatatggagaaatcctgtctctactaaaaatacaaaattagttgggcgtggtggtgtatgcctgtaatcccagcttgttgggaggctgaggcaggagaatcgcttgaaccctggaggcaggggttgcagtgagctgagatcacgtcactgcactccagcctgggcgacaagagggaaactcagtctcaaaaaaaaaaaaaaaaaaggtcatgggtcatttcaaggatccttaaaactgcaggaatgtgagaaaatgcgatgctgacatccacccagacagcctcaccataaaggagggaaaaaacagctacaaacagtgtaggtggggggaacgcttcgctgtttgagacgccagactctcttgctctgggattcacgcggctgcctttctgttacagctcaccaagcgtcagaagcacgtcgagccgtgtactcggcccaaggagttcagtgtgacctggcaggaactgagggtttgtttaaaaggaagacagcattgcacaatttcacaaggcttttgttttgtaagcatcggaactctcctcgttaccagtgctagcgcccccgatgggaggggcaggggagtcgcagatggtggtttctgctgtccctgagcacagaaagcctcatgagggaggtggcttatccagtgcagagctcagctttgtagagtgagtggacaagtgcccgtcggtggccatcgtgcggtcagtagccgagtgggggactgtgcccggccacacttcctttgtctcactcttctcctggctgacaggcattttctgagccaagtaggtctttggcatcttagatttgggcctgtcccaggaacgttctgacttgtcaagaaatcgtaccgttaatttacggtcatgctttctttccttgattgaaataaacaatctggagaggcttgctcagaatttcttggctttcaaaagttgcctgtctttttttctttttctttttcttttctgttttttttttatttttgcttgccccctctctctccctgcttctctggctcttcctcccttccctctttcttttctttctttatccacctcagtgatctcagcaaacacgaggggatggatgacaagtttgcgtccagccatctccgccctgctggcaggctgtgcctctttggcggtggccgagcgcgaagttgctctgtggctctggactgggatcgtgtttgttcaatggacaaaggctgagaatcccgaggccgactgcccagtggctgctgcacctcaagaccccgagggctctcaggtgcacagtgacagtcactcacgcagacctggccccgtttgctggtaggcgcgaccaccgttgtgtttttcagacaagcctgggtgacttgctgtgaaaacgtcagctgagggcacggtggcaggatttccccctgcatagacctcccgtcagcattcatagctggacccaagtgctggcaccttccgagccgccggcagtggcggtgggcctgtttgcgtttttgcggctgccctagtctccagggagagagcgtggagacagacgatttgtatgagattagccggccgtggattcagaatcgctctttgtgtgatgggtcccaggggttccttttgaccacagagccagcctgaaactacccacgggtgctgtggaccccttgatcatggcgggatggaaatgggctgtgccctcagccgggactcaggactgcagcatgtctgggcagcagcctggaagctggccagcctcggcgcccttggggacagcccttgacactctggctcggtgccctgagtgagggggcgccaccctgggctccctgggatgcgagcaggacccaagccaggctgctggaccgggacagtcgcgtcatgttgctgttgtccccttcctgcagcatctccatactctcctaaaatcccatctgtcagacagtgttggctgtaggcagagcgggcctcctgtcttgcagtcgggccgcgtggatctgattgtcttgctcaggagagagagaagattgccgtccctagcatgcacttgagtcaagcctctggaatttcaactcctgctccctgctctattccaactgcttcccccaggaaggggggacgaggcggaggaagtcgttctcttgacacccctagaacataaggcatcttggccaggcacagtggctcacgcctgtcatcccagcactttgggaggctgaggagggtggatcacctggggtcaggagttcaagaccagcctggccaacgtggtgaaaccccatctctactaaaaatgcaaaacttagccgggcgcggtggcacgtgcctgtaatcccagctactcgggaggctgagggaggagaatcgcttgaacctgggaggtggagg[138 bp omitted]gtggaagccacagaatttttttggcccctctagccacgggtgtcctgcgtaccccaaaggcagagcagagcctgcttctcagctagagcctgaagggcagctgccgttcatcaaaacagctcctgtgcaattctgtgcctgtcgctggctcaggggcgcgggaggagggatgggctgcagcgagcgggtgtggtcaggcccaggctggtgcgtggtcactgggagctcgggcagcatggctgtcactgtagccacaccctgggtccctctgagtgggtttgcattgtccagctccgcgtgagagttgtcaagttcatgcgtgcctggtcaggggcgcagggtggccagatgaccagtgtctcctgcccgcagggcctcttggtggaaggagatggagaataactgccaagaggggtagaaaccaagcctggaggccggatggctgtaacccagcactgtgggaggctgaggtgggaggatcggtggaggccaggagttcaagaccagcaagggcaacatggcaagaccccatctctacaaaaactagaaaaaatttgccagatgtggtggctatgtctgtagtcccagctactcgggaggctgaggcgggaggattgcttgagcccaggagtttgagcctacagtgagccatgattacaccactgcactccagcctgggcaacagagcaagaccatgtctcaaaaaaaccccaaaaaaccaagcccagggaagcacagggcagtgcagtgcgccgggaggcttcccataggaactgctgtttgcgcagagccttgtccattgtgggaactgtcacagatgactgtgagcttgagagcagaggaagtagcgagaggaacttgggggtgtggcctgggagatctgagaggggatggggtcagggtgaagcccacctggcatgctggaggcagctgggcacccaggctctggggtgtctctggaggtgttacccgaaccagtgtgatcatggggacatgaggcagcaggcagccccgtcctcgaggagctcagagtctagttggcaagtctagaagccattcctgtcaccagggagggccacctcacagttgcccaactattggcgtcagtgtgctggccaggttctgaattttctaggacagcctcccttagaaatgatcctgccattttaaaaaatatatatttttatggagctatcattcacatactatgaaattcatcttcttaaagtatacaattcaggctgggcacagcggctcatgcctgcaatcctagcactttgggaggctgaggtgggcagatcacttgaggtcaggagtttgagaccagcctgggcaaaatggtgaaaccccatctctactaacaatacaaaagaattagccaggcatagtggtgcacgcctgtagtcccagctacttgggaggctggggcatgagaatcgcttgaacccaggaggcggaggctgcagtgagctgagatcatgccactgcactccagcctgggtgacagagcaagaccttttctcaaaaaaaaaaagatacaatttagtggtttttagtacattgacacagttgtgcaaccgtcaccactatcaaatgttagaacctttctattattacacaaaggcactctgcctccaccagtggtcactatccatcccctcccccatctgctggtacccacacatctctttcctgtctctggattggcctgtcctgaacatttcatagagatggagtcacacactgtgtggcctgttgtgtctggcttctctcagtgggcgtgatattctcaaggtgtatccacgcatggcatgtgtcagagccttgtcccttttctttcttttttttttttttttttttgagatggagtcttactctgccacccaggctggagtgcagtggcatgatctcagctcacctcaacctccgcctcctgggttcaagtgattctcctgcctcagcctcctgagtagctgggattacaggcacctgccaccacacccggctaatttttgtatttttagtagagatggggtttcaccatgttacatggccaggctggtctcgaactcctggcctcaagtcatctgcctgcctcggcctcccaaagtgctgggatgacaggcgtgagccaccgcgcccggcccactttgtctctttacctggctgcatcctattcccctgtgcggggggtgtcctgttttgttttccattcatctcagtgggcatttaagttgttctcattttttcagccccatcctctccccagtctgtggcagagctcagggattcctgtgctgcaccatgcagaatacaggccgagatggccccggggcagacacagcatagaaaccatttgtggggctggggtgggcggggtcagcttggcggatgctgggctgcggctaggctttgaggtgcagtggcccggcgggcctgcaggggtgcagaggtaccctgtgaggccacagggtctaggctccaggtcattagtggcgagtccgcgccacgggcctcttctctcagcctgagctggcgtgcctcagccagtggggccctggcagggacctctctgtgcagccacagggcccctgtgtctccgctccatggggcagcgtggccccagctgaccacagctctgacttgccctttgctgtgtcctgtaaggtcacccctggtgagcaggacccctgagtccaccacaccagggcccgacggctgtcctgtccccctcgtcctgtttttggtgtcaccccgctgtctggttagctgtgccggcctccctgaggggcttgtgagaagatgccagggcctttcttccccagagctgctcccgcgaatccagcctggggttggagagcacgctgctccctgggtcacttccctttcctggtccggggcctggtcccagccctgacagggttgtgagccttaggaggtggccatcaggttctaaatgtgcccctggggcccagcagcctccacctggacgtccccccaggaggttaaaggggtgagtgggagccccccccaccacgccgggccccttgggagtgcaggtgggttctccaggggagcaggtgacactgccaggcaccggcggtgctgtacagtcagcccagtgccaagccccacctcttcccacctgctctgcagtgctctccctgtggggacagtgatgtgcctggggactgtcacctgctctcccctgacagaggatgtgggttacctggggtgccccatcagtaccccaggggctgctgatgaacatgggaagaccccatggcagggggcggtcacgtaactaaacactaccaagtgtcatgtggtgaaggtggacccctgcctcacaccatggccagaagccaaccccacatgtagcagagatgagaacatgttactaaaacgattacaaaacctctagaagagccaggtgcagtggctcatgcctgtcatcccagcactttgggaggctgaggtgggcagatcacctgaggtcaggagtttgagaccagcctggccaacatggcaaaaccccgtctctactaaaaaatacacaaaattagcctggtgtgttggtgcaggcctgtaatcccagctacttggaggctgaggcaggagaatcgcttgaacctgggagatggaggctgcagtgagccaagattgcaccactgtactccagcctgggcagcacagtgagattctgtctccaaaaaaaaaaaaagccagacgcagtggcacatgcctgtaatcccagctactcaggaggctgaggtataagaatctcttgaacctgagaggcggaggttgcagtgagccaagatcgcaccactgcgctccagcctgggtgacaagagcaagactccgtctcaaaaaaaaaaaaaaaaaaagcctctagaagaaaacctggatgtatatgtaaaatgttgtatttcctttttttaaaaaaatttaaaattatttttatttctatgtttttaatggcttgtctgtataaccaaaagtgatgttctctctctctctctctctctttctctctttctttttttgtggcggagtctcactgtgtcaaccaggctggagtgcagtggcgagatctcggctcactgcaacctccacctcccgggttcaagcgattctcctgtctcagcctcctgagtagctgggactacaggcgcgtgccaccacacccagctaatttttgtatttttagtagagacagagtttcactgtgttggccaggctggtctcaaactcctgacctcgtgatctgcctgccttggcctctgaaaatgctgggatgacaggtgtgagtcactgcacctggcctaaaagtgatgtatgttttaaggcagcgctgtccagtgaggatgcagaacaagcccgtgtgtctgaattttctggtagctgagttaaaaggtgaagagaaatgggggaaattaattattacagtgtattgtattgaacccagtatacccccagttttatcatttcagcatgtaatcatcatcttcaaaactgttggtgagatgtttcacactgctttttcttttcttttttttttttttttgggtgctgtctttgacattcattgtgtatttcccctgagagctggccctacgtggttgatcatttggggagggccctggccccggatgcactgagcgtgatgccagcctggtgctatagatggggtcctggtgcttagtggaccagggcccacgctccttcctcccaccctcccaatcctgcccccgcctatcccaggcaggacttatggctctgatggtgtctggctggagagatgagacacacctgacattcaccagcaatggcaggacacgctgcgacaggtgcggctgaagaagagctaggctgtctggcggtggtcctggcctatcttcccagtgggctctcgcccacagtctctcgcctttgccagggagcactgaaccgtggactggtcctgggggccaaggggtcctggcggcccagcctgggcagcgcctctggcatcgcagctggtggggaggcgcagggctggtggggcttaggaggcgcttggcactgaggaggtgtttccgggaagagaatggcaggaagttggaatgcttctttggctgtaggaaagcccagaagagagacttgtggatcagcaccgcccaggaataacatcctatagccacaggcggcttcaaagggcttgagctatcagggcaggattgcgggaggattcgcagcagggaggatggacacccggagacctgctacccatgcacgtagcctgctgggctcagatccacctctcctgggtctgtgtctttatttccaaagtgggggtggctctgcaggtcccgcttcaaggctgggtgaggttaactgaattaccacgcgaaaagcccttggtgaagtagttctcaccccaggggcaattctgtctcttaagggacacctggccacagctggggacatttgtgatggtcaggatttaggagtgctcctggcgtggggtgggtggagggcaaggacactgctcagcaccctgcagtgccccgggcggcctcatcccagggaaggctccaggccagcatccaccgagcggaggctgaggccccaatccagagtggcgctggccaggttgggccccgggaggtcacaggaatgatttttctctgggcttgtttctgctcttgactgtgaatagaggtgctgcactagaagtttctaaaatctttttccattccaagacagcttagggtttatgctgctcttcgtgtttgtgctggaaaggaagttaaggagccgtggaagtgatcataaagcaacttgaaaataatagtttttgcggcctctttattataatggggcagccaggtgggttggccggggttttatgggccaggaagcaggcgtgggggtttctgggggaagctggacccgaggcagcgttgaccccaagaccaggactccgcgtctctcctgttccggcctgttccgtacgcctcgtcaggttttctgctccggtgaacttggagtgtgttggggactgacagatccagagaacatgcccctctgctgcatgatgccgctggggccctcgggagggcttggggtgtgtctgtgggtcttgcaaacactctcctcttggtgagaaggatctggttgcattttgtgcccttgggctgtcccctggctcggacagaggtgtccctgctgtaacccccacttcgcagggtaccagatgccactgcccaggagttactaatgtacctgggggtctggcacctgctccgtgaaacccgaggtctccctgtactaattaatttggcctttagccaaagggagggctgcagccttcgggatctgctgggtcacagtgggtgttaccctaacaagtttcctagagggatgttcattagaaaaataatttattttatggtataaaaattagcaatgacaggctgggcacggtggctcccgcctgtaatcctagcactttgggaggccaaggcgggcagatcaccttgaggtcaggagtttgagaccagcctggccaacatggtgaaaccccttctctactaaaaatccaaaaattagcccagcatggtggtgcacgcccgcagtcccagctactcgggaggctgaggcaggagaatctcttgagcctgtgaagtggaggttgcagtgagccgagatcgcgccattgcgctccagcctgggcaacagagcgagactccgtctcttaaaaaaaaaaatcagcaatgacagtgaagtggaaacaaaacaatacaagctgccgtcatctccagtgagcttccgaggtctctgctccatccatgtggatgtttgggaggggccctccgtgggctccaggcggctggtttagaggtggtagaatgttctagctctgtgaggctgggattcccaagtggagacctgtgatgctgctgggtgacaggcagaggatcctgctgtgcaggctggggctgccatgggaggcttggagcccgagggtggtgaggatggaattaagggatctggccccgcgtgctgtgccgggtgagaggcgggtgtgagcatggcaggaggctttgggggccgaatgtgcagtggaagcctggatggtgagcggatgagctggtgctggaacccagacccgccttcactgcccccagcgttgggccaggaccgctcatcctgtgggcggatggttttgctctgagcctcagcaccggttccaggagcgcagcctgggagcgcggattgggactgtctgtctctggccaaggctgtgtgtgtctcaggaagcctccccggcgcccagccctccacctctgtgtgttctgcaccggccgtctcccggtttttccctcgctgtctgggcctgaaacagcccagaagagaaatcggatctcttctcagcctgagcttctcttttagcctgagctgaaagagatcatcttgggaaggagctccccagcccggcttggattggtcccctctctggtgccccgggggagtagtgatggattcaggacttggtcctggtctgacctgccgtgggggctgtgatggggtcctgatgtgccccgtgtgccatggcgctcgccaagggccagcatgtctgcggcctcacaggggcttcacgagccacattcggggcagcgcttggtttggagtctagagccagagcctggcgtgggacccgagctcgtgaactctgtcagtgccactgacttggggcagtgtctccgtgtgcctccctgtggggcgatggcggagtaaacgggtgatggccactgagcgctggccgtggggactcttggtcctggctgccaagtagaagcttcaggggtgctcttcacagtcagctgactctgctgtccctgatagcagaagacagcgaaggcacctgccccctgccatggcaggtcggcgggcacagaggagggctcgggaggctgtgtcctccagcgtctccatgtttactgtgccaggccaggtgctgaggggccggcgaggaagacgtgaggactggagagagcctggattagggccctcgaggggcggcgctgctttagccgggggaacagggagggcctctcccagcaggtgacattcagtcagagacctctgagcgactcacacctgcccacctttgcaggatttgggacaagagtgctccaaagaagtgcaggcagcacgtgcggaggccccaaggcggaacgaggcgcagctcactgagctggcaggagcagagaggactgcaggggcacagaggccggagcagcagtgcctgctgcctagtcagccgtgagggcaaaggctggaggcactgctgtcagaggtttatgcctttttttatttttattttattttatttttttttttgtgagacggagtcttgctctgtcgcctaggctggagcgtagtggcacaatctctcggctcactgcaacctctgcctactgggttcaagcgattctcctgcctcagcctcctgagtagctgggatcacaggcgcccgccactacgcctggctaatttttatatttttagtagagatggggtttcgccatgttgcccagtctggtctcaaactcctgacctcaggtgatctgctctcctcggccttgtaagagttaaagaaagaggaaagaaacacaaaatgcagctggcagttaaaggcaagttttctttagttaaaacctgagaggcgctcttggccgattgcggtcaggagcgctttctcttatagactaagagtatatattggttttagggtgaaggggcttatcacaagcttggaacgtttctgtgtgtggagaagtttatggcagggctggaatctgtctgggaggaggggaggttatcttggggcagacatcttcccggccggaggggggttatctcggggctggcatgtctctggttggggaggagtttgcgatgtttctggctggagatgctatttgtggtttatggtcatgctgatcttagctgttaggctgataccctttggatttagcggtcttttattaaggtgaacttttagaatgaggggcttgtccgggatggcaatgcttctgctgtcaggcctcccaaagtgctgggatgatgggcgtgagccactgcgcccggccagtatatgtgttttaaagacctctctggtggctgtcaggagtgaaagcaggggacctgtcgggaaactccaggcgtcgcccaggtgattcatggcaatggctcaggagaagggggtctgggctggggctgcggcctggactgggggtggcttttggaggtagacaggataggcctggctggtgggttgaatgtggagtggggagatcactgctactcccagggtgcagcagctggtttcacgcccccagctcggccacttcctgcacagcgatgtggtcttgggcctgagaacgtgggaataacaaactcagtttctcccaggctgtcagagcagtcacagatcccttccagcacacgcgagcaaagcggtgcaggggcaggagctggggccctccgttcagttcactcctacctgggggctgcatcgggcaggacaggctgcgggctcctccccacgtacctaaccccacggcccatgccagtcacaagccccaggctgtgtcctgagcttctgctggacgcgctggaaaccagccttctcatgaacccttctttttttttcttttttgagacggagtcttgttgtgtttcccaggctggagtgcagtggtgcgatctaggctcactgcaagctccgcctcctgggttcacgccattctcctgcctc[187 bp omitted]aacccttctttgagcttaatttgctaatgcacctctcaaaactcaggggagctgttacttacgtttaccagcttattagaaaggattttacaaaggaggcagatgaagacatgtgtagggtgagggatgtgggaaggggcacagagggttccgtgctctccccgggctgtgacgtctccaggaacctccacgcattcatctgtggggaagcttccatcccagtcctccgggttttacctcagcttcctcgcagaggcttgggtgacctcactgcattggcctgggtgatcaagtcagccttcagccacatgcccctcccctcccgtccagcctgggtcttttcagtgagcagccctattccctcagctcccgaggggctgccaagcccttagtcacctcattagcacactggagaattccgaggatctgggggagtcgtaggccaggaaacaggacaaaatgtatttcacagtctcactgggccggtcccttgcctccgcttccttgtctgtgatgagaggacgggagggtggctgtctggacagtgctgaagtggtagaggtgagtcgctgccgtggagggcttggcagggtgctctgtgaagggccctgtggcctggggtggaagccgcttgcagagtgctggttctttgcctaaggatggtggggcaggggggccgtgttcacacgtgctgttggctgtgtctgccagtcttcctttcttttttctgtttctgtttctttttctttgtttttttttgtttgtttgtttgttttgagacagagtcttgctctgtcgcccaggctggagtgcagtggcacgatcttggctcactgtaacctccgtctcccaggttcaagcgattctcctgcctcagcctcccccagtagctgggattacaggcatgcaccaccacgcccagctaatttttttgtattattagtagagacagggttttaccatgttggccaggctagtcttgaactcctgacctcaggtgatccgcctgcctcagcctcccaaagtgctcggattacaggcatgagccaccatgcccagtcttcttcttcttcttcttcttttttttttgtgagatggagtttcactttgttgtccaggctggagtgcaagggcacgattttggctcactgcaacctctgccttctgggttcaagcgattctcctgcctcagcctcctaagtagctgtgattacaggcatgcgccactgtgcccggctaatttttgcatttttagtagagatagggtttcaccttgttcaccaggctggtcttgaactcctgacttcaggtgatccactcgcctcggcctctccgagtgctgggattataggcgtgagccacggtgtctgactcagtcttccttttcatgtcatcccttgttaatttcctttagaaacagtttgggccaggtgcagtgggtggcttatgcctgtcatccaagcgctttggggggctgaggtgggaggatcacttgaggccaggagttcaagaccaggctgggcaacataatgagacccagtctctacaaaaaaattaaaagcttagctgagcatggaggtggcacctgtaatcccagctacttgggaggctgaggcagaaggatcgcttgaacccaggaggttgaggctgcagtgagccacgattgcaccagtgtgctccagcctgggcaaaagagtgagaccctgtccccgccccacaaaaagagggtcagaaccttggtgttagagcagttcacttccacccaaaaacagggacttagaaagggagacacttgtgtggagcccgaggcagacatgccctgacttagcagtgcaggtttctgtactggaatgagggcctggggcaggtggcctctggcaggatgcatctgttacctgagtctgaaggcagcgtggcgaggagatgggagggctgtgcctgggatcctggggccgtggagagctcatctagaggtcatgagtattgggcaaagctcacatgccgtgttttaatactgtcattatggaagttggcctgggggtaatccagtgtctcttttagatctgtgttgtacaaacactgaactagttctggtcgcctctccggcctttgttttggggagaatattcgatgagatggcccgtaattctaacactgtgcattttgaaggatatttataaacccggatggataaggcccttcttagtgctattcttgtgttggttccctttattattttttttaaaaaactttattatgggccgggtatgatggctcacgcctataatcccagcactttgggagtctgaggtgggcggaccacctgagatcaggagttcgagaccagcctgaccaatatggtgaaacctcgtctttactaaaaatacaaaaattagctgggcgtgatggcgggcgcctgtagtcccagctactagggaggggacaggagaattgcttgaacccaggaggcggaggatgcagtgagctgagattgtgccgctgcactcctgcctgggcgacagagtgagactcggtctcaaaaaatagtaaagcaaaaaataaaaataaaaacactgttatggagaatttgactacacagaaaggtagacaacatggaataacgagccccccaggcccctcacccagccccaaaaccatcaacccatggcaaccccccctgccctacccccatctgtggtgaaatagccctcatattatttttgttaacttttaatttttaaagaattacagaggctgggtgtggtggctcacacctgtcatccaggcactttgggaggcagaggtgggaggatcacttgagtccagtagttcgagaccagcctgggcaacacagtgagaccctgtcgctacaaaagcaaaaataagaatgaattatagactgccaaggtgttgcaaaaataataaagagatttccctaggcttcaccctgctgtctccagtggtaacattttacataactttagtgtcccgttaaaactaggaaattgacacaggacactgtggcttcagaccttcctcaggcgtcctcagtgttagcactggctcattcttttggtagagtctttgcgacattctgttacctgcacagattccaggaaccaccattgcaatcaagatacagaactgttctgtcaacacaaaggaacgctctgcttctcccttctgtcacccccaggccctggcgacggctgaggatctctgcatctctgtaaccttgcccttttgagaatgttatgtagatggaatcacagcgtatttaacctcttgggattgggttttttcgcttgcaatctgtcgaagttgttgtgtgtatcagtagttactttcttttattactcagtagttctccatacgggtgttgttttctcattctgcttatttctgtgagacgggtggcagtggtaaggtcccatctttcattcccgattttagcaatttgagttctccagagatggaggacaagatccaaggttgccagggcctgggggcgacagagtggaagcagagtgagttcctttgtgttgacggaacagccctgtatctgattgcagtggcggttccaggaatctgtgcagataacaaaatgtcacgaagacatttaccttcgacagttttactggtcttttcaagggaccgacttttggtttcattggctgtctctattttgtttatttttgctcgttatctttgttacgtactgtgctccatctgccttagtttccgtgtgctcttctttttccagtgtcttaagggagatgcttaaattaatatttgagatcttcctctttttaaaaactgtataggcaattataaatttccctctaagtactgctttagctgcaacctgtactttttttttttccttgcgataggatcttgctctgttgcccagactggagtgcagtggtgcagtcacaaatcactgcagccttgacctcccgagctcaagcaatcctcccacctcagcccaccaagtagctgggaccagaggcatgtgctactatccctggctaatttaaaaaataattttgtggagaggaggtctcactatatttccccaggctggtctcgtactcctgggttcaagcattcctctcaccttggcctcccaaagtgctgggattacaggcatgagccactgtgtctggccatcctataagttttactttgttgtgagttcattttcattcacctcaaaatattttctaatattttcttcctgttcaaccctgtgattatttaggagtatgttggttaatttccatgtacttgtgaatccccaaattactttctgttgttgatttctaatttccattgtggttggagaacttactttggatgatctgaattcttttcaatttaatgaggcttgttttatggactaacatatggtttatcctggagaatgttccatatgtactgagaagagaatatgttctatagattcttttggcttatagtgctcaagtctctctctttgttgctcttctgctagttgtgttatcttttattgaaagtgagggtatgagccgggcatgggggctcatgcctgtaatctcagcactttgggaggccgaggtgagtggatcacctgaggtcagcagtttgagaccagcctggccaacaaggcaaaaccctgtctctactaaaaacacaaaaattagccgagtgtggtggcgcatgcctgtattccagctactcgggaggctgaggcaccagaatcgcttgaacccgggaggcagaggttgcagtgagctgagatcaccccactaccctccagcctgggcgacagagtgagactccatctcaagggaaaaaaaaaaaagaaagtgaaggtattgacatctccagctattgttgaattacttctccttttatttctgtcattttttgcttcatgtattttggggctctgttattagatgcatatatgtttataattgctgtatcttgctaatggattcacctttttatcattataaaatgtccctctttatctctagtaacttttttgtttgttttttttttgagatggagtcttgcacttttgcccagtctggagtgcagtgttgcgatcatggctcattgcagcctcagcctcctgggctcaagtaatcctcctgcctcagcatcctaagtagctgggactacaggtgtgtgttgccacgcctggctaatttttttgaattttaacagaggtgaggtcttactatgttgcccaggctggtgtcaaactcctgaactcaagtgatcctcccaccttggcctcctgaagtgcttggattacaggcatgagtcattataccacacctggcacatttttttttaagtctattttgtctgatgttagtgtagccactccagctttcttatggttcctgtttgcatgttacacgtttaatttttatattttcagcctgttttttttttttttttttttttgttattgttgttttgtcttttttgagacagggtttcgacctcccggcatgcaccaccatacctggctaatttttgtgttttttctgtagagacgggttttgccacattgcctaagctgatctcgaactcctgggctcaagcagtttgcctgcctaggcctcccgaagtgttgggattacaggtgtgagccactgtgcccagcctattttcagcctgttcgtatctttg[133 bp omitted]tctactaaaaatacacatgcgtggtggcgcatgcctgtagtcccagctactcaggaggctgaggcaggagaatcgcttgaacccgggaggtggagattgcagtgagccaagatcatgccattgcactccagcctgggcaacaagagtgaaactctgtctctcaaaaaaaaaaaaaaaaaaaaaaaaaagtgtcccctgaagacagtatatagtatagtatatagttggatcttgttttttaaatccagtctgacaatttctgtcttttgattggatgtttaatccattcatatttaatgccgttattgatatagttggatttgtacctgccatttccctttttgttttctattttgttcctttattccttctttgatgttttcttttgcattaagtgaatattttctagtgtaatattttaattcttttcatgattgttagcactatatttttggaagtattttcttagtagttgctgtcggtcttataggcatcttaacttctcagaatcgacttcagatccccaatatcatttgaagcaaggctgtgcttactccttttgaactgtgcttagcaatcaggatttcacttaatcagttcaatggcttgggttttcaaggatgctgatgtgtttgtttgcctgaatggtgcctcttcttttgctcattcctcctcacattcagtgaaatgaacacatcaaagccctcttaggacctgtgatcatcaaaaccatttggagaccccactgtctcgggagcagggcttgggaaggacaccagctcccctgtcatccctctccttgtgtttctggcttcttttcatctcccttgcaccactgaaactgatgagtttgtagccctgttcctgacacaagactccaaatctgtgtcagtgggtctcacccacttggaggcaggtcttttttttttgagatggattcttactctgggcaacagagcaagaatcctgggttcaagcgattctcctgcctcagcctcctgagtagctgggattacaggcacccgccaccacatccagctaatttttgtgtttttagtagagacggagtttctccatgttggccaggctggtctcgaactcctgacctcaaccgatctgcctaccttggcctcccaaagtgctaggattacaggcatgatcctctgtgcctggccgaggcttggcatttttaatttgaattggtagagagtgggtgccatcatcgttttgatgatcattcaaccccaggaatatgcatccctttcctgagaggcactctcatcctctacgcagagcagccagtgagctgctggagggaccttgggtcccagcacagtatcccaggctggctccctttaaatactcgttgtttttataaaagggatatgtaagtatggttggcgtgtgaactacaaatgtccctgcatcctgcgaccctgaaatggcctgtcttggtgttggcgctcctggtcgccgcggtgtcacgcgtagatctttgcttctcagtggctctgcagtcctttattttggtacagatatgtgtaatttacttacccattctcctactaatgagcacttacttttctctctctctttctttctttttagacagtgtctcgctctgtcgcccaggctggcctgcagtggtgtgatctcagctcaccgcagcctcctcctcccagttcaagtgattctcctgcctcagactcctgagtagctgggattacaggcatgtgccacgacgcctggctaatttttgtatttttggtagagatggggtttctccatgttggccaggctggtctcaaactcctgacctcaggtgatcagcctacctcagcctcccaaagcgttgggattataggcgtgagctactgcaccgaactacttttttctcttttaaacaatgctgctggccacatccttgctgccagcccttctaggtggggttgctcagagtgtgtgtgcctgttttatttttatgtttttgagagggggacctgctctgtcatccaggctggagtgcagtggcatgatcacagctccttgcagcctcagccccctgggctcaagcgatctcttgcctcagcctcccaagttgctggggccacatgtgtgcactaccacatctggctaatttttttttttttttagtagtgacgcggtctcgccatgttgtccaggctggagtttattttgaagcgtgttgctcagctgtcccctgaggtggtctgaatttgtgcccctgcacagtcattgtgggacagtcattgtgttggggacagctctggtctctgcccctccttataacctgtctcctcgtgctggttcttgtttgagttgccagttcatagcctttgcctgcttgttgatttggtatgttttttttcttgacttaaaaacaaaaaaacaaacccaaagcttctcaaattcggcactcttgctatcttgagctgggtccttctctggggtggggctgtcctgggccctgcagggtgctgagcagcagccctggcctccacccactgcatgccaggagcaccccctagtcgtgacaaccacagacagccccagacctcccagtgttccctgtgggcacagctgcatggttgggcagtgtgggtctgggtgagtgggttctttgcatccctggcctccaccccctccacgccagcaccaccctcagtcgtgacagccataaatgtccctagacatcggaaggcatcctctgggggcacgatcagccttggtggagaacccctgttttggaataaccctttctgtacccgggctattaccaccctattgtgttaccttttttctcagttcctcacttatctttagttttatttttggtgcgttgttacataggatgttttcaagttgcctgatgtgtccttccctttagggcttccgagtttgtgtcccacttagagaggtttcccccgccctaggagtccaggagcgtcggcccctggcttccactgtgtccttctgtggttcatgaggacctgccatctgggggcggcgaggtgggctgggctttgtgtttccaacatgtccaccccagccggctgggcctgcgtacccagtgggtggcgctcaggtctgcagctgcctccttggctccccggttgttagctgtgtgatctagggtaggccacttcctgcctgtgcctcagtttcctctcctgggaaatgggctggaatagctgtccctgcctcctccggttggtgggctggtcagccatgccaggcactcagagtcatccctgcctcctcgagttggtgggctggtcagccatgccaggcactcagagtcatgcctgcatgggggctccaggacctcgtcatcagcctcttcatccttactgtctggtctgttccaaaggccgcaggccccagaaagacggtgacactccaggaggttgctagacctggcgggccccagggccaggagtgaggggcggacgtgccactctgcactgctgtccctctccacccaggccttggggctcccagacaaccatgaaattacaaggcaggtttgtagatgcatagattatttagttaatgattatggttttaaatggttaattatggaacatcagatacctataaataagtgtgaaacatggactggtcctcttgtgtctgccaggggttgcctcctgactgggtgggagcctgcttgggggcccaagtctgctggcatccccgctctgtgtggctccatcccctcgcctgggggcagtggacggacaggtggcctttgcccgtagtgctccccagaccctgttgagtgcctggcaaagatgtaggtgggctgcacctccctttgtgtggaaggttccagaaggaagtgccaggtgaccaagcctgtgtctgtcctgggttttcttggctcttcacccaaacacttcccttttttgttgtttttgttttaataaaatttttttggacataatttcagactgaccccaaaattgcaagaataataggaagaattcccagacacctttcacccaggacccccatgtggcgacattccctgctttgcctttaatcctttcctctcattctctttccctgcacttcttcctaaactgtcagtgtgtggcagacatgacatccctttacctctccttcagtgtgtatttcccccagacaaggaatttttgtatcaagttatcaaaatcagaaattcacgctgataaaatcaaatctacagaccctattctgactttgcagtaatgtccttaagagtcagaagagaatccaggatcaacacagcactcagtcgtcttgcctgtcggttccttttaacctggggctgctcctgagtctgtctctgggttctctgactctgatgttttgggggcgtacaggccgtcattctgttaaatgtcccccaggtgggtttgtctgatggttcctcaggaccagattcaggccacacacttttggcaggaaagtcctggagccgacattgggtccttcttagtgcgccctatcaggaggcccatcatgctaatttgtcccatttctggtgatgttaaccttgatcctttggttaaggtgggcccgccaggtttccccaccctaacattactattgtaccatttgcatctcatggggaggccagtgtaaacacgccgttactcctcaaacgttcactgcttgtttcagcagacattgattcttgccgcatggtggttgtctagtcctgtcatttcttctgcgtttattagttgatgtctcctatacaggacagctgtcccttgttcctttcttatttctatcagggtgggcttgtggattcttactttgttcaatgggttataatccactgccatcacgattgatctggttgctcagatggctccacatttttccagaaagagcccggtcgagctggctcctgggccatttgacatgtccccaccctgctcggagcacttcccaactttttggcactgggatgctcccagctcatcctgtagtctccctcatggtcgatccctgggattgaccaatctccaaggagccctggttctgtttgtggagaatgccacttagaaaccgagatccaggtgctccgtgtgctcagtgctactggggtgtctttgcttctaggtcctctaatcagacagagctgggaagtagatgtgtgtacatcttacacacatgtacattgtgtgtgtatatatgaatagacatgtatacatacagacacctgacatttgtatccatctctgcatccatctatccacccacccatccacccatttactcacctatccatctatccacctgtccacccacccacccacctgtccatctatccatctatccatccatccatccacccacccacccatctacccatttactcacctatccatctatccacccgtccacccacccaccgacccacccacctatccatctatccatccatccatccacccacgcatccacccatttactcacctatccatctatccacctgtccacacaccgacccacccacccacctatccatccatccacccatttactcacctatccatctatccccctgtccacccacccacccaccaacctatccatctatccatccatccatccacccaccaatcccatttactcacctatccatctatccacctgtccacccacccacccacctaccaacctatccatctatccatccatccagccacccacctatccacccatttactcacctatccatctatccacctgtccacccacccacccacccacctatctaccatccatccacccacccacccatccacccacctatccatccacccacccatccatccacccattcacatatccgtccatccatctattcattcaccgatccatctgtccgtctgtccatccatccatccacccacccattcacctatccatccatccaaccgtccatctgttcattcacctatccatccatctgtctgtccatccatccatccatccgtacatccatttattcatccatccatccatccatccatccccattaatgcccatgagttcacactgaaacctctagttccagccccacacccagggtcccttaccatctttccccatcgttatttgtaactcccttggctgacagtgagaatccacccactgcctaccataaaagcatcctccagagtaggagccaatatttcttttttgtttgtctcaaagacatacagtcccaaactgtatttaaaagtttacatggattagttcttccatttttttcccccttctttactgtggttatattgtttgcttgaaataaggtttggtttacttgtttttgtttgtgttttggacaaggattttcctcctcaactcttgctgattttagttgcctgttgattgatttcttgattcaacatacgtgatgtagtgtatagaacattagcatggttccagagtcaggactgcacaaaaaggcatgggcggagaagtgtcatcaaccccctttctcctccccattcctgcccaccccctgcaggaaaggaatctcgttagtctctggctcagcctttcagggcagctcaaagaagcagatgtgtatttttttaatgtccccttcttttttttttttgagacagagtctttctctgttgcccaggctggagtgcagtggtgtaatcacagctcgttgcagccttcacctcctgggttcaagtgatcctgccacttcggcctcctgacttagctgagaccacaggtgtgtgccaccatgccaagctaatttttttatgtttttatagagaaatacagggtcttgctatgttgcccaggctggtctcaaactcccgggctcaagtgggctcccaaagtgctggaattacaggtgtgagccacggcgcctggccttataccttttctttcgcacgtgaaagtggcgctgtgctctgttcatttagctgtgtgtcctggaaaccacttcattggccagggagctcttcctggctcccctgcacagctgcgtagtgttccttgcagggatgcagcgaagtccacccagtgtctctcctgcatgtagatatttagtttgtttccaggctcttacggtggcgaactgtgctgccgtgagtaacctggtgtatatggattttcacattggtggaagggtatcttcatggtagattttcgtgagtgggattgctgggtcagaagtgcagacatattttgttagcttttatgctaaacacccatgtaagtcctgttccgccagctgtgtcgtctgggagggcctggttcccctgcctcgccagcagggtgtgctgtttcatgtctaaatacttgccaatcccagtgctgagaaatgggggctcagtggagttctaatgattgttcctgtagttatgagtggtgatgaacatcttgttgtgattaaagctgtttttgtatcttttctgtgagctgtatcttcatacttttcacttgcttttttctattggatatttgactctttcctcctaacttgaaactccaatatgtgaacctctgtggtatgtattgcaaatatttcctttgtgttttttttttctttttttttctttttgagactgaatcttgttctgttgcccaggctggagtgcagtggcacaatctcagctcattgcaacctccgcctcccaggttcaagcaattctcctgcctcagcctcctgagtagctgggattacaggcgtgtgccaccatgtccagctaatttttatatttttagtagagatagggtttcgccatgttggtcaggctggtctcaaaatcctgacctcaggtgattcaccggccttggcctcccaaaatgccgggattataggcttgagtcacctcacccagtgcaaatattttccctcggtctctggattgccttttggctttgttattggtgtttggttttcttttgccctgcagagtgtttttttttctttctcctttcctttcctttctctctcctttctctctcctttctctctactttctctcccctttctctctcctttcctttcctttcctttccttctttctttcctttcttctttctttcttttcactttctttttctttattctctttctttcaagacgaggtcttactatgttgcccacgctggtctcaaactcctgggctcaagcagtcttcctgccttggcctcccaagcagctgaaattacaggtgtgagcctgtaattagccacacctggctaattaaaaaaaatagttagctgggcacggtggcttacacctgtagtccccggactgtgggaggatcacttgagcccaggagtttgagaccagcctgggcaacatggtgagacccccatctctacaaaaaagaaaaaaaagttagccaggcatagtggtgtatgcctgtggtcccacctactcaggaggctgaggtgggaggattgcttgagcccaggagttcaaggctgccatgagctatgatcacaccactgtactccagcctgagtgacagagcgagaccctgtctcaacaaaagtcacatttctgagtctttactttctttgcctcttgattagagctgtggttgtaaagccctttccgtctctggggctggagaggagttcacctcgtttttttctggctctcgtatgattcctcctttacactcacgttccgattccaccgccgttcattctcgcagaggtgcgaggtggggacctcactttattgttttctgaatggctaccctgttgtcccagctccattgattaaaaaaatccctgcttgggccgggcatggtggctcacgcctgtgatcatagcactttgggcccaggcgggcggatcacctgaggtcaggagttcgagaccagcctgactaacatggagaaaccccatctctaataaaaattagctgggtgtggtggcgcatgcctgtaatcccagcttctcgggaggctgaggaaggaggattgcttgaacccaggaggcggaggttgtggtgagccaagatcgtgccattgcactccagcctgggcaacaagagcaagactctgtctcaaaataaacaaacaaacaaacaaacaaataaataaatccctgcttggccaggtgcagtggctcacacctgtaatcctagcactttgggagggtg[134 bp omitted]gagttaggagaatcgcttgaacccgggaggtggaggttgtagtgagctgagattgtgccactgccctccagcctgggtgacgagagtgagaccccgtctaaaaaaaaggtccctgcttaccccactgccttggggaaccccctctgtcccccacacagtctccgtatatgcctgagtctgtgtttggtcttcctcgtctctccacagcaggtctgccccgtgggttgttggccgcggtcggatgctcagccgcttgagaatgctgtctcctgcctgggtgcgtctggctcccctctgcgcgtcctgtttcgtgttattttttagagtttgtgcatttctctgtgtactttggtacacaaatgcttctttgaagttaatacgtggcagtaaagctggcactggggacggctagggcggtggatggcgtgtgtcctggagggcgggtgtgctggcagagacttaaggatgaggttaaggattctcctaagtccttttcttctgggggaaggagactcgtgggaacccctccagtgcaatggcctcgccatttccacacgccggcccctggcactttccaccattcgtgtgctcggctcccagctcttgccctgccacaggccctcgctccctcctcacccggcctggagtgcatggcccacagtgggcctgttctcaccgcgcatcccgccagctccttggcccttctcagcccttgctgccccccgggctcatacacctctacccacgatccagagacggatcgtcaggcccaccccagcccggcagcttcctagagcaatgccctcagccaggcatgttgtctggggacgctcggcagtgtctagacacagccagtccctgtgacccggtgtgcatgtgtgctgccgtgcacgtttcagctccccagtttcatgtagttgagaacgcttgactgtgagatgcaccacggctctgtgctccctgggagtccccgtacccccgtgcggtgagcgtgagaagtcacccacagaggggcaggaaggcggttatattttaatggtcacaggtgggcagtacccctgggtgttgggcagaggccacccctgctcccctccggaatacactccctactgtccaggcagccctcagattacagcccccagcctgaccccagagacatgcaaatatgggacagacgtaaggctttggtgccggaaccaggagcatcccgggcaaagtgagacgagctggtcaccccctgcacagtctcccacttccccaggcttcattctcccacccctggaagtggtaacccttctagaggtacctgtgtagcgtcttccttttctgcgcgctctgtgtgtgccggcctgtcctgcggccgtcacctggcagatagctgctgtcccagggatccagcacaaagcttggagatgcgtctgtgcagcccactctgtggctgtgtgtggagttgatggtggacttctgtcaccccatgacatctgaggctacaggagtggcctgtggagatgttggtggccaggtggcacaagtatggagaacacagatgcccggggcagctggcaagaaggggcaggtgcttttgaaagatgttaccaaaccgtccttcccagtggtgctgccaggccactggggcatagatcagtgtgggcacctgttcctccatggcctctgtgacctgtcgtgtcattggacttgctggtcagcctcctgagtgacaggatggtgacagctgccacttaggggacctcattgagcttcctgaagaccccacgatgagggtgttaacatggggagccccctttacagatgaggaaactgaggccccagaggtgggggcctcaccctcctccgggcctcatggtgggtggtgggggttcaccttcctttatttgcatgtggatatcaagcagttgtcccagcactgtttgttgaaacaccttttctttctgcattcagtggtcttgggaccaggccttgggggactgtgctctgtaccatgtcctcacccaggacgtccctctaagatcgctcttagaggctacagggccacgggggagaaggtccccaccattctccagcggctgcctcgccacacagctgggagggatgtggggtagagagccccctgcttggcactggccctgggggtctaagtgatatgaggggcaggggtcgcccctgcagtcaccgcgtcctcctctggcggaggtgagtggtgatgctgggtcacaagaggtggcttctcatcccagtggtctcgtgctgcacttcagggcctccatcacctgatctgggggctgtgggggtcctgggagagggctcatgggtaggggacagtttttgatgttctcttagtgaaggacagagaagaaggatggggggctggtggcggcggcagggagccaggatggtgctggtcccgcctcccttccttccatccctgctgcaggcctgccctcttcatgcctggctccccgcagcctctccctgtccccgtctgtcccgccactactggaaccccaccctgcctctgggtagtgtgcaccccatcctcagagcggaacccccatcccctgggcttgtgggggcttcacttcctgctgtttccccgcagcccacggccattctcctgctcctcccacccctcctcactgtccttcctggcactccaggcccctccgccgcatctttctgactcgtgttgccacatcatctgccctggctggggttttatctccctggcaactggaaatgtgttggttaagatatggtgagttaggccgggtgcagtggctcatggctgtaatcccagcactctgggaggccgaggcaggtggatcccctgaggtcaggagttcaagaccagcctggcaaacatggtgaaacaccatttctactaaaattacaaaaattagctgggcatggtggcgcatgcctgtcatcccagctactttggaggctgaggcgggagaattgcttgaacctgggaagcggaggctgcagtgacctgagatcatgccgttgcactccagcctgggcaacagagcgaaactccatctcaaaaaaaaaaaaaaagatatggtgagttaagagggtaaccagccctggagctgacagcctgggttagcacctctgggacttgggacggcctccatgttccgctctgtgaagtgggagtgacaacagtgcctttcccatggggctgctgggaagtgactcaacgaggagcaccagcaaggggacaccagagcgggccccagccacctcctggcagaagcatggggctcacgaggcggggcgggggtggtgaggaccaggcgcagacctgggcagggacctgggcggaacgggggaggcggaatcttctagaagggccttgggggagggccctgtccccaccatccctcgtgagcaccccctgccaacctccatctcccatttgagagttggggaacgtagcaaagttatctcaggactggaatatgaatggcagctcttggccaggctctgccatattggagaggtttctagaaggtcctggaagcccactggctcctctgtcattttcggcatggttttggcctctcctcttctcccttgcttcattgctgtgatgtcaagcatctcttcctgtgactgttgactctttttgtatcttctttggagaaatgtctgctccatcctttgcccgtgttttctgttaggttgtttgtcttttgttgagttgcaagagttgttgacatattctgcatacaagttccttatcagataatgttttgc[131 bp omitted]cagcctccaactcccaggctcaagcgatcctcccacctcagcctcccgagtagctgggactgcaggtgtgcaccacaatgcctggctaatttttttcttctttattttttgtggagatggcatcttgctgtgttgcctagtctggtcttgaactcctgtgttcaagtgatcctcccacctctgcctgccaaagtgctgggattatagacatgagctgccatgaccagccaagtcttttcactttcttgaggtctttgcaaacaacttttctttttccacatgcacttttggtgttttagccagaaatcttgcctgatccaaagccacgaaggtttaatcctatggttttcctaagagttgggtagttctgagctgggtatactagctcacatctatatgcccaatgctttggaagggtgggttgggaggatcgtttgaggccaggagtttgagaccagtgtgggcaacataggaagatactgttggtacaaaaagtttttaaaaagagttttgtagtttgggcacttacatttagatctatgacctatttggaattagtataaatatatggtgtgaggtaagggtccaccttcattttttgtgtgtgaatatccagctgtcccagcactatttgttgaaaaaactgttctttttgcattgagtggtcttggcactgttattgaaaatcacctgactttaagcgtgtgggtttatttctggactctcagctttctcccgtttatctaatgtctgtacttatgccagtaccatgctgtcttgattactgtaggttcataaccgtgaattattttttgtctagtcttgagtgtagatgttaaggaaaaataatatggttcttacattaacatatagagacccagattagctgatgagactacagccttcttagttgagatccagaaaaccctggctgttccctgcctccttgtttcttctttttctttttctttttttttttttttttgagacagagtcttactctgtcacccagactggagtgcagtgccacaatctcaattcacggtaacctctgccttctgggttcaagcgattctcctgcttcagtcccctgattagctgggactataggcatgtaccaccacacttggctaattttttttttttttttaatatttttagtagagacaggttttcaccatactggccaggctggtatcgaactcctgacctcgtgatctgcccgccttggcctcccaaagtgctaggattataggcatgagtgaccatgcctggcccctgccttttttttttttttttttttttttttaaagacagagtttcgctgtgttgcccaggctggagtgcagtggcatgatctcggctcaggcagcctctgcctcccaggttcaagtaattctcctgcctcagcttcctgagtagctgggactacaggtggatgccaccacgctcagctaatttttgtatttttagtagagatggggttttgccatgttggtgaggctggtctcaaactcctgacctcgaaagatctgctcaccttggcctcccaaagtgctgggattccaggtgtgagccaccgctcccggcctattccctgcttcctttattgagccatgccaccttcctcagttggattttggtatcaataaggatatgaaggttttggtgacatatttctaaataagaggctgtttccctaggatgcagaggttggtgacaaatgtcagcttttcagttctttcactcaagaaggatctgcaacttgaattcagcaggtttggtcttcagtggggcctggaagtggaagggatgtggtggtgtccacttggtttctgatcaccttggctctttcacggcctgactctcctcttccagtgaaaacctgctatgccttgagcttcagaggacagaggtccaggtggttgtttggtttggtctttttaactttttattttgaaataattttagactcactgaactgttgcaaagatagcacagagcgttcctgtgtacctttcactcagcccctaatgtgagcatcttatgtaaccacagaatgctcagaaattagccaattccatactaccatgcaatttactcaactatagattctttttttttttgagtcagagccttgctctgtctcccaggctggagtgcaggggcgccatcttggctcactgcagccactgcctcccaggttcaagcgattctcctgcctcagcctcctgagtagctgggattacaggtgccttccactacgcctggctaacttttgtatttttagtagacacagggtttcaccatgttggccaggctggtctcaagctcctgacctcaggtgctctgcctgccttggcctcccaaagtgctgggattacaggtgtgagccactgcacctggcctcaactatagattctattagaatatcactagttgtcccaccaatgtccctttcctggtctaggacctcgtccaggaccccactcaccatttagtctcataggctcctccaggtgtgccaaggcctccatcttgccttgactttcacgaccttggcacttccaaagagcaccaggcagatgttttgtagaaggaacttcccttggctttcagacgttttctcatggttagcctgggctctggactttttagaagcataccatagggctcatgctgctccttccctgtgcagtgtatcaggaggtgcgtgtggctgatgtggctgatgcggctcagcgtggtggtgttgaccgtggccgcctggctgaggcgtcggtcaagtttctccactgcaaagttactccttttccctttgggactttgagcctgtgaacatgtcctgttccttcaacttttgctcaccaatttttacatttccgcgtggctctttcctgcaggaaatattcccgtggtgttggactggtgattttatgttatgcttattcctttgacacttatgaaggagaattcttctgtggaggaaagctgtccctcttccccatttatcagttgcattttatttatttatatatttttgagacagagtctcactcttttgcccaggctggaatgcagtggcgcgatcttcgctcactgcaacctccgcctcccaggttcaagcaattctcctgcctcagcctcccgagtagctgggattacaggtgcccaccatcacacctggctaatttttgtatttttagtagagatggggtttc[142 bp omitted]gtgtgtttgttttatcctgtgggttgtaacatgatgctgtcattcatcctggtgctgaggtaggtggtcctcgttttggccatcaggagcccctcgcatgtcctttctgcccgctcccatcctgtcaagccttcccttcctctcaggtcctgcagggcgatctgggctcagcttgtatattctgccccagccctggaattgaccacgtgtcctgcagggctccctggttcctcacagtggagaatgatgtttacaaactgtggcctgggtgctggccgtgctcgatgctgttggggcatcattgcttctaggttttctctgctgacagggcttggaagtaggaacgctaacccatgtgtatatgcacacctgtatccatctcactgtctcttttccagagctcctgagttcatactcatagggtgccagagcgttcatgtcgtgggcccatctgaggctttgggtgtccacccccaacctgtaaggggtacgcagagcccctggaaaaaggaggaccttcctgtggggctgaagacttgggtgggaggcaggagatggcatgtcccttttgaaggccacctggggcttgtggccgtgggagaggcaggcagggctgggccctgggccatcccggctcaggcaacctcgccaggcgtgcaggtgagaggatcccttctttctggttcagagactcctgtttttggacccgtgctcagacccgggaaagaggtgggcagtgtggtctggtgcaggcccaactttcggaacccacccgagggtcagccctgggggctccggtgactggcagccccatggccaagagtacctccttttggggggttcttgggggccaagttctgtggtcctcaggcctctgtgctgtggtgccactgtctcctccctgattcccgccagtggtctcttcttccgccccacccgcgggtcttggcggaggggctcacagagccagcactgtatctgaggctgccctcagggtcagcacgtgcggggcagtggctgttacgtaatcggtagctcgtgctgtttgggggcgttgtcgtccgatgccttgggctgtcactgcaggcttctgtcatgctgcggtgggctccccttgccagttctattcctagtgcccagatctgcctagaagccgcagcagggttgacaggctgggcccgtggcagggtgcagtcaaacctaagccacctgggtcttcccctcctggcagttaatagaacttagcttttggagcagttttagatttacagagaatttgggcaagtggtagtgagagttcccgtctctgcctgccaccccccacccgttttccttgtgggaacatcctgcctgttgtggcgcatttgtctcttgattaacacgttgttaatgacacttcccgcttcattcggattgcctctgctttcccctaatggactgttttctgtcccagggccccccacaccgggattcctcgtggcccgtagccgtcccaggatccttcgtggcccgtggcagtcctgggatccctcgtggcccatggccctctcctcaggctcctctgggctgggaccactcccgacacgttccctgtgttttgtgcctggacagtgttgagggggctggccaggcagatggtagggcgcccctcgattggggtgtgtctggcattttgctcaggctggcacgcggtggaggctgttgggaggacttcagaggtaagggctcttctcatcacatcccggtgagcgtcaggacgtgggccatcagcaggatggggttggagccgtgtggctgttgctgctgccctgacggcgtagctgcaggggttcatcatcctctccccgggatgctgcccccgactttccatttgtgcactgatggaaggaagtcaccgcatagcccatgcgtaaggaatagggagctgcctgggccccaacccctcgtcttccctcctggaggggcagtggaggcaggctagcccggcctctcatctattgcggatggggaccagggtggacagaggcctaggctcgggctgtgccttgagaactggggcccggcctcagccccagagcctccagcctcccagcttggagtgggcgcttttggggccccagagagggagggcagaaggacccgtggtcttggtagcaccgggctgaggtctgtccagctgagagcctcagggtctggtggcttccatgccttcttgaccaagtgctgagagtgggggtggcccgtcgtgcagcgggggagagagctgtacaaagagacagttacttgtggcaggggagacccaggatcccgtggggacctggtggcagccaggagcagcaggtcacaggggagaggcctgggtggcccctgggagtggacaggcccttgtctccgctgaagtcagggaggtaccctttgctgctatgacaaatggccgcagacacagtggctgaaaacagcacccgttcattctctcccatgcctggaggagagaagtctgacatgggcctccctgggctaaaatcatgatgtgggcagggctgttccttctggaggctcccggagacagtccattcctttcctctcccagcgtctagaggtgtccgcatccctcggcttggggcccttcctcccccttcacagccacagcgcagcgttttccaggccttgactctcaccctctggcctcctcccatgaggaggctgtgaggacattccgcctcccggatcatcccctatctcaagatgcctaactcagtcccatccgcaaagcccctgttgccatggaaggtgaaatagtcccagggtctgggggttaggatggggacatctttgggaaccattgttctgctgcccacagctgcgtggagggattccggtcctcgggttcagttggtgacagtgtcgggtaggcctgggcaggtgggagaggtcgtgaagccctttgcagggcacttggccgctcatctggcacaggggaagaggcgcagcccgtggcccggcagtccaggacctgctgttcccttcctacccggggcggggcctgtgggaagatatggaagtcgggtgaatgagccgtgcccagtgattttaaaaagcagattaaaataacatagaaaatgtcagagctcattgcgtgctctagggcatttgtgaaacttgcattatttatttttttgagacagggtctcgctctgtcgcccaggctgcagccttgaactcctgggctcatgcgatcctcctgaggagctgggaccacaggcacatgctaccacacccggctaagtgttttgttttgttttgtttttgagacggagtctggctctgttgcccaggctggggtgcagtggcacgatctcggctcgctgcaagctccacctcctgggttcacgccattctcctgcctc[223 bp omitted]gccaggctgttgagactcctggcctcaagtgatcctccctcatcatcctcccaaagtgctggcattacaggtgtgagccactgtactacttggtgttatttaaaagtcctggtgaattgtaaaaagtgtacaacttcgggaggc[135 bp omitted]gaggcaggagaattgcttgaacccggcaggcggaggttgcagtgagccgagatcgtgccactgcactccagcctgggtgacagagcgagagtccgtctcaaaaaaaaaaaaaaaagtacaacaaaaccagggccccagggggcgagctcctctgccctggaggttgggcctgccgaggggaccttagagtgcttctgaagtgagagttggcattagctgagcagaaggaagcagagggcagcctgagctgagagccagcaccggtggagctctgagacgagggctcgcaggcctgggcacccaccgagccccaggtgtgccaagtccagtgggagctgcaggtcaggttgtgaaagtccttttttttccctagacgtagtcttgctctgtcacccaggttggagtgcgtgcaatggcatgatctcggctcactgtaacctctacctcccaggttcaagtgattctcaagcctcagcctcctgagtagctgggattacaggtgcacatcaccacgcccggctaatttttgtgtttgtagtagagacggggtttcaccatgttgaccaggctggtcttgaacccctgacctcagctgatctgcctgcctcggcctcccaaagtgctgggattccagatgtcagccacctcgccccgccatgaaagtcttgatattggccggcgtggtggcttatgcctgtaatcccagtactttgggaacccaaggcaggaggatcacttgaggccaggagctcgagaccagcctggacgctatagtgagaccctgtctcttaaaaaaaataaaaataaaaaagtcttggtgtcacatccaaagtttggagttctgttccgcatccatcctacaagtatctgagcgtctttgtgtccaggactaagttcaacgcctgggctgtgccttggcccctgtgcggtcgcagcccctgcccccctctctccccgtgctctgcctcttggtgttgggaggtgggggaaaaactgggtgcattttctgcacttttccccttggaggaagcaaaacttcttgaaaatctctcagtaggtgtctgcgtcttaaggcctccagaagcttctttggtttcatttgactgttcacggatactcccgctgccttggcccgtagattttaggagctaagcttaaaatgggccctcattggaaaacttgactgggtaaagtgcttatagttacggatttttgtcttgttaaaaattgacaagaatgtggaaaatctgaataaaggcaagcgtcctcgggctgcgtacagctggtgggagtcgaatttagaattaaaacttgagcgtgccatcagtttagttaatcatgcttttatttgcatgttttaggaaccatcactgttgctggaggcacctgacaaatcctagcgaatttttggagcatctccacccaggaacctcgccatccagaagtaagtaacacgggcctggcccccaggtggccccacaggaccagggaccggaaggctgtggcctcttccctgggtggcccgccagggagaaggtggtggcctgaccggctctgaattcccgggacgtccaggcgcaagctgtgcttagacgggagcctgcgggccatggtagggaggttcttctgcaagtttcttcatgaagcctgtctgctttgggcttgcatctcgcccttcggcatcgaaccacccgactctcacttctagaaactggaaaagctgtggctcctcctgcatttcgggtgacactggggtttcccaggacccactaccctgtctgcatcggccctggggacacctgagctcaaggggcgttcccccacacactgtcagaagtggggagcagttagagcagggctctctaaaaatgggagactcatttttaaatgcctttgaggtagttccatggcccagccgccccgggtttagttccttttcttgtgcctttcttataagccggtggcacaaagaggtgcctctggtggcagcccagggggaccactcaggagaagagagagaatgacctcatcccttctggccacacccacagggcccgggtgacccagtggagggtgtcaagtgtgggatgagcagtgcagtgtcctcccgtcaaggcagaggtggcagtggcagcggcggccggcagagcaccggggaaaggctgccttgtgcggcgtcgcccttggattgtgtgccgcttccctgtgcagagggaggaaggggcccatccagggccccctgtagctaatgagggcgagtgtggacttgagctggggcccttgagtcatttgtgggtgccttttctgttctactacgattaggaccttgaggagggtggtggagcccagcctcttttgggaagtcataaagtgtaagggaagaggctctggtcacgtggttggcaaactatggcccctggacccaatctgaccccctgtttttataaataaagttttattggcacatggctgtgtccatttgcctgagcattgtccctggttgccttctcctcacagtgggagaagtgactagctggaacagagggcgtggcctgcgcatctggagatatttcctgtttgggcctgtgcagaaaaccatgcgcctcctcttgtccaggttaacttactgctggctggagcaggatggacgagtctcttggtgacttggtttggaaattggcaggtctgtctgtgcctcctgaaatcttgcttttacccttcaagtttgtgcttccttacaagatggtcaattttctaaaactcagctgttttctttgtacccaaattaacacagcatgaaccaagtaagcaacttgctctgtcagttagctttattatttatttatttatttttattttttttgagacagagtctccctctgtcacccaggctggagtgcagtggcgtgatctcagctcactgcaagctccgcctcccgggttcacgccattctcctgcctcagcctccctagtagctgggactacacgagcctgccaccacgcccggctaattttttgtattttcagtagagatggggtttcac[137 bp omitted]acccaggctggagtgcagtggtgtgatcatagctcactgcagcctccacctcctgggctcaagggatcctcccgcctcagcctcctgagtagccgggactacaggcatgcacaccacacctggctaatttttttattttttgtagaggctatgttgcccaggctggtctcaaattcctggcctcaaatgatcctcccacctcaacctcccaatgtgctggggtcacaggcgtgagtcacctcatcctgccgaagttcaccacatagcccttgataaacccactttatatctgaaggtgctgagtgcagcaaccaggaggtgctagaaagtcctcggggagagcacaggagacaggagtaagggagcagggctcctgcttccgaaggcctggagctgaaggagaggaggagctcagggcaaaccatgtgggcttgctgtggtttggcaggtccccagataggctgccttcactttgtaaaagttaacttttactgagaggaaattcacatacatcatattcactctttaaaggatacagtttggaggtcgttggtgcactcacagggctgggcagcatcaccactcattccggagcatctcattgtcccagaggaagctctgtccccctcagcagttgctcttcatcctgtcccccacaccccaaaaccaggcatctccttcctgcctctgtggactggcctgtcctggacatctcatagaaatgggatcgcgcactgtgtggccttttgtgcctggagtctctcactgagtggcccatcctcagagttcatccactccgtggcctgcgtcagagccttgctccatttcatggctgagtcgcgttctgctgtgtgtggtgccgggcgacctgctcccctgctgatgggcgctcatgtggcctcctctctggctattgggagtcgtgctgctgtggacattggtgtgcaggtgttggtgtggacgttggtgtgcaggtgttggtgtggacgttggtgtgcaggtgctggtgtggacgttggtgtgcaggtgttggtgtgggtgttggtgtggatgttggtgtgcaggtgttggtgtgggtgttggtgtgcaggtgctggtgtgggtgttggtgtgggtgttggtgtgcaggtgctggtgtggatgttggtgtgggtgttggtgtgcacgtattggtgtgcaggtgttggtgtggatgttggtgtggacattggtgtgcaggtgttggtgtgggtgttggtgtggacgttggcgtgcaggtgttggtgtgggtgttggtgtgcaggtgttggtgtggacattggtgtgcaggtgctggtgtggatgttggtgtgcaggtgctggtgtggacgttggtgtgcgggtgttggtgtgcgtgttggtgtgcaggtgtgggtgttggtgttggtgtgcaggtgttggtgtggatgttggtgtgggtgttggtgtgcacgtattggtgtgcaggtgttggtgtgcaggtattggtgtggatgttggtgtgcaggtgttggtgtgcgggtgttggtgtgggtgttcgtgtgggggtgttggtgtacaggtgtttgtgtggacgttggtgtgcaggtgttggcgtggatgttggtgtgcaggtgttggtgtgggtgttggtgtgcaggtggtgtgcaggtgtgggtgttggtgtgggtgttggtgtgcaggtattggtgtggacagtggtgtgcaggtgctggtgtggacgttggtgtgcaggtgctgctgtggacggtgtgcagatgttggtgtggacgttggtgtgcaggtgtcggtgtgggtgtgcaggtgttggtgtgcaggtgttagtgtgcaggtgttggtgtggatgttggtgtgggtgttggtgtgcaggtgttagtgtgcaggtgttagtgtgcaggtgttggtgtggatgttggtgtgcaggtgctgctgtggacggtgtgcaggtgttggtgtggacgttggtgtgcaggtgtcggtgtgggtgttggtgtgcaggtgttggtgtggatgttggtgtgcaggtgttagtgtgcaggtgttagtgtgcaggtgttggtgtggatgttggtgtgcaggtgttggtgtggatgttggtgtgggtgttggtgtgcaggtgttggtgtggatattggtgtgcaggtgttagtgtgcaggtgttgttgatgttggtgtgggtgttggtgtacaggtgttggtatgcagatggtgtagatgttggtgtgcaggtgttggtgtgggtgttggtgtgcaggtgttggtgtgtaggtgttggtgtgcaggtgctgctgtggacatgcgtttttgtttcccttgggccgacacatgggtgtggaatcgcgggtccaagggtacattctgtttagccttctcaggaatcgcctgcccgtctccacggcggctgcacccttcaacattcccaccagccgtgcatgagggctgcctctggtcttggaaaagactctcggaatagttgctcactttctccatttcgaccctggagccgtcgcttggtgcccagaggaagccaggccgcgggcgctgggggaagggggtcccactgcagctgcaagtcggcctctcctcctgcctgcttcccgtgcctcggctgttggcttatttgagtattgaatcgtaatggtttcttcctcctaaatagaatgctaggtttccttgttcaggcctcgtaacttttcctgacctgtaaaaaagcacaccttgaacacttcgctttctgtctgtgcacacggataggtgtcagctgggggctgatagaaaacatccctgactggccgggtgtggtggctcacgcctgtcataccagcactttgggaggctgaggcaggcggatcacctgaggtcaggagttcaagaccagcctggttaacatggtgaaactccgtctcaactaaaaatacaaaaattagccggacgtggtggcgtgtgcctacaatcccagctactcgggggctgaggcaggagaattgcttgaacctgggggcagaggttgcagtgagctgagatcgcaccactgcactccacctgggcgacagagtgaaactgtctcaaaaaaaaaaaaaaaagaaagaaaacacccctggctgcaggcttcgggcggccctgtgtcctccagctcttggggtggggccactctgacatcatgtgctgttttggggagtgtcatgaccaggagggcatcttttgttttttcttttaattaaaacaaatactaggctgggcatggcagctcatgcctgtaaccccagcactttgggaggccaaggcgggtggccttgattgcttgaggccagaagttcaagaccagcctgggcagcatggtgagacctggtctctacaaaacaaatacagaaagtactgggtgtggtggcatgtacctgtggggcgggaggatggcttgagcccgggagttccaggctgcagtgagctgtgattgtgccaccgcactccagcctgggcgatacagcaagaccctgtttcaaaaaataaaataaaaaacaaacactgaaggaaaagagtagatagagtgcaggcctggcacaggttttttttttttttttttttgagacagtctcgctctgttgccagactggagtgcagtggcgtgatcttggctcactggaacctctgccccaggttcaagcaattttcctgcctcagcctcccgagtagctgggattacaggagcgtgccaccatgcccggctaatttttgtatttttttagtagagacagggtttcacggtgttggccaggatggtcttgatctgttgacctcgtgatctgcctgcctcgtcctcccaaagtgttgggattacaggcgtgagccaccatatccagccagatttttaatttaagagacttggcacgcattttttgtttgcctctgtctgctttccgtaggcccccaagcaggggcaatgtgtgatcgtccgtttgttttctcctctgcagtttgggggtccttgggtagaaggactgagcattgagcttggatcaaactgttggttttatggacagagtcaagtggcccggaggtggtgacttgggccatgttccttgtgagggttttgtctgtggctcattcattcagcacaggcgggccctgtggccaggtgctgatagtcctatgttccctctgagagtgtggccctggtccctcatctcctggggatcagtggtagggccaggcctggccccaggtgctctgggtcttgtgcctgtccttcctcacaccacctctcttgggtacgtagggcacagggcacaggacctccgcccgagggccaccgtgctgaggtgtggctcacatctcgtggcttcatcttgaggctggtccgtctgcttgtctcaccacacttaggcctgagtgtctgaagaagtaatgagctgcaaacctcatgacctggaaatcccacctgtcagagcccaggcctcaggaggaggcaactgaggacattgggagtgccagcaactggagcccacttccacctgcctcacttaggccactggccacccccacggatggtcccgggagttagctctgtgaccatgcgcggctgttcctgctccacctcttggagtgccgcctctgtctgttggtgttgcaggggagctgggttgggagagctcactcccttgtctgattttctggaaactgtgctcctgtctgagtgagcgcaggcagaggtgctcagtttacccgaggtgtgccgggcaggagtgctctccaggtgggggggcttggagggatgtgggggttggtactttttttttttgaagttttaatttgtagtttttatgggtacaaggtatgcttatttctttgcatggtacatttcccacatggcagtcgtggtggactgaatgatggtccccatggatgtccacatcttaatccctggaacccatgaatatattaccttaaatgacaaaagggacttttcgcgggtgggactgagtgaaggaccctgagctgggagatgaccctggatgatctggggagcccgatgtcctcaccgggtcctcatgagaggaggcaggagggtgagagtcagagagaggctggaagaggctgtgctgtggctgcggaggtggaggaagggccttgagctgagggaacctggcacgcgctggtgctctctggagtaggacgaagcagagaacgttctcgtgccaaggttttctctttcctgcctgagggccctttatgtagatcagaccagagacaagtgaatcccggtcttgccaggggaggcatttggagctgctcgtgggacgtggtgatgcggtgccaggccacatgcccggggctggggccgagtggcgttctcgtgctgcctctgtggccaggtttcacttgggaacctggctgcatcgcgggttcctcctgggccttctggtggcttggggctcctctgtcctcggtccctgctgggaaccgtgctttggcagcaggaaccagcgagatggcagcacaggggctggaggccggctgggactcactggggccgcatggggcttcacctgatgcccagccctcctgggacagggaccagtgggagcaggaggtgggacaagaggacgagggctcgagggagcccccacacttcctacc[132 bp omitted]gcagcctcgatctcctgtgctcaaggaatcctcctgcctcagcctctaagtagctgggtgtgcaccaccacgcctggctgatttttaaattttttgtagagatggggtctcgctatgttcaggctcatcctgaacatctagccccaagtgatcacccaccttggcctcccacagtgctggggtcacaggcgtgagcccctgcccctggccttcttatttttaaaccgattctttgtcatcagtttctgcgtgtggccgctgagagccatcacctggctgtttcttgggtgtcccttgcgcccacacccctgcatcctgccccaccttcaagttcttccatcccagagtggactctggggtcaaggagagtcctcagatcttggggacatgggcagttgtggggcctggggtcatgtggacaggatgccggcccagccccagcagtgccagtgcaggtggggtgaaggcctgatggggtcagccagactgtccccacctgaagccccctgccaagcccctgcatctgaagactgaagagtgagggtggcagcccgggagggtatccttgggcccagtgtgtcagcgatcaggagagcagcccaggctggagcgtgcggccctgctcagccgggccggaagcgtccctcacttgttcctcccccaggttgcagaggagctgtccaggacagccggggtggggccgcccataagatgcagctgctggtcccatgtcatggtcacagcaggagggctgaggagccaggcctggcccgtggtgtgcagggtccctggaacaaacagctgccctaaaaaaaaaaaaggctttaaggccaggtgcagtggctcatgcctgtaattccagcactttgggaggccgaggtgggtggatcatgaggtcaggagttggagaccagcctgaccaacatggtgaaacctcgtcctactaaaaatacaaaaattagctggacatggtggggagtgcctgtaatcccagctactcagaaggctcaagcaggagaattgcttgaacccgggaaacggaggtttcagtgagctgagatcgcgccactgcacttcagcctgactgacaagagcgagactccgtctcaaaaaacaaaaacaaaaaggctttattgagatacaatttgcgaaccatacaagtcacccatttgaagcatgtcattcagtggtgtgtagtttactcagaaggctgctcttgggcctcaaaatgagtagaggggagaaagggaccctttttttgttgttagagattttgagagctgggttgggttaagcggctttcatggtaagctggaggcccaagcctgtcttgagccccgaataaagaagaaacctaggggtggggcgtggtggctcacgcctataatcccagcactttgggaggccgagatgaggggatcgctaagcccaggagtttgccctggtctcccagcttcctctgcggtgccccagccaggagcagctgtagactctgtggaccgtatgtgaaatgaacccacagggttcccgtgctaaaaccatggagagtcttcaggtggggccagccgggccttaaactgtgtatctaactgagtggggcctggggtacccatgggggttgcatgccctggaagccagccctgcctgccatccacttcccacagccagagagagctttctagaaatttcggttggatcgtgtctccttgctctgaaccacctgtcggcttcccgtccaaccccacaggagggcaggctccttccagcccagcccccagggcccaccctggtctagcctcgatcctgccgcctcctctgcgctccctgccatccggcctctggggccttagctcttccctggcttcgctgggtccttccctttgcctagactttcctcctgccctggaccgcccagaacttgcacccctgcgtgtttgacaatcacttccagacgcagccccgctgccacccagacctctctggtcccaaaccaacttcatttgtctttttccttttttttaaatttatttatttattttattttacttattaattttttttgagacagagtttcactcgttgcccaggctggagtgcaatggcactatctcggctcaatgcaacctctgcctcctgggttcaggcagttgtcctgcctcagtctcccaagtagctgggattacaggcgcatgccaccacacccagctaatgtttgtatttttagtagagatgggagtttcaccatgttggccatgtcttgagccccgaataaagaagaaacccagggacagggcgtggtggctcacacctataatcccagcactttgggaggccgaggtgaggatcgctaagcccaggagtttgccctggtctcccagcttcctc[139 bp omitted]tggagtgtagtgatgtgatcacagctcactgcggcctcaaactcctgagctcaatcgagtgtcccacttcagcctcccagagcactgggaccacaggtgtgtgctgcagtgtctggccttcatttgtcttcgaaactcttgctcgcccctctgtgacgttgttaattagtagtcttccagattgggccccgtctcgtcccagaaccgaaactctgcctggcacgtggtggggcctgcacatttgctcagcggaggaggattctggggccctgggttcccgaggctggcaagttggctcagagctgcccttgggatgggtcagggtggggtaggctgggggcagcacagagtgggcacaaggcagttttgtggttttgaaattgagtttgtatcaagagctttactgcttttgtaaaaacttactggcatggtaccaagagaaattcaaacaatagttggtaataaaatccctccctacccctgccctggtgtccccataggagctgactgccgccccctttctgcagcattagctattgtctagaatcttctacaaggatggggcagggcggtgggagcagggcccgagggtcccagttgttgggaactatgttggcctggctccagccagctcacaccacggggcagccgaggcctcctttggcccagctgaggccttcacggcaccccgaggcccagagtcccgtgagcgggagacagagaaaggggtctccaaggaagggtgggcctggcagcagcactatgagcagcggcaggtgcagggtgccaccaggcagaggccggcagaggcagaagccggtacggttgccctgcgtctgtttccacatctgtgtatttgtgccagggctgctaaacatgcacagcaggcactgtggcgcccaccccaaatcacaggaaggatgtgtctctctgtgaccgtgaagcccaccaccactccatagtgttggctcacacccggctgtttcccacgcctccccgcgtgtccccaagacaaaaggtctgggatgaagctgccgtttgcatggctggggatgtctccttgtcctctctcagctgagaagagtgccagtttcctctcttcttttgcgagttcaggagagcattattctttcttctttccatcattcttcctccctccctttcttctctctcttttcagtttttttttttttttttgagacggagtttctcgtcacccaggctggagtgcaatggcgcaatcttggctcactgcaacctctgcctcccgggttcaagcaattctcttgcctcagcctcctgagtagctggggttacaggcacccaccaccacacccggctaattttcatatttttgagtagagatggggttcatggtgctggcc[136 bp omitted]acactcatttgttcacccatttaaagtgtccagttccacagttttcagtatattcaaaaacttgtgcaactatcatcacaatttgatttttattcatttactttttagagacagggtcttgctctgttgcccagaggctggagtgcaggggtgcagtcatagctcactgcagcctcgaaatcctggcctcaagtgatactcctgcctcagctttttgagtagttggcaggcacgcaccaccatgcctggctaattttttattttaatttttagtagagatggggtctccctacgttgcctaggctggtctcgaactcctgggctagagcacccctcccgcctcagccccccagagttctgggattacaggtgcgagccactgcactggccacagtcagtggagaacattggcatcccctacagagaagccctgtagcctggggtgtaacacacggccttttgtgtctggcttctctcactgtgatgtcctcaaggttcctccatgtggcgcctgtgtcagagcctcgttgcttttcatggctgtgtcgtattccaccgcatggatgggccatgttgtgttgattcattcttctgttggtggacacctgggtcgtttccacctttggctgttgggaattgtgcttctgcagacgtggtgtacacgtttctgtgtggatggatgttttcatttctcttgggcagatacgcaggagtggaattgctgggtcaagtgtgatttatgtgtgacatttccaggagctgccaagctgtcttgcagagcagctgtcccacgtcaccgtcctgccagcctgtgttcgagggccccaatttctccacatccctgcccacagtgtcaccgtctgtcattctgattctgccatcctggtgggagtgaggtggtggctcattgtggttctgatttgcatttccctggtgctgagtgctgctgggcaccttttcacgtgcttgttggccatttgtctactttggagagctgtctgcccaagtccttggcctgttttttgctggttttttagacatggtttcgctcctgtagcccaggctggaaggctggagtgcagtggtgcaatcttggctcactgcaacctctgccttcccagctcaagcgattctcctgcctcaccctcccaagtagctgggagtacaggtgcagaccgccacacctggctaatttttgtattttttatagagacggagtctcactatgttgcttatgctgatgtcaaactcctggcctcaagtgatcttcctgccttggcctcccaaagtgctgggattacaggcatgagccaccgcgcccaccagccttggcccatttttactgggctgtttgtctttgcctctgagttgagagccccattccttggcgtggcgccgttgtgagcatgttgctgttgccgggcagctcctctggctcttccagggtgtctgatgcccccgagtcatcctgtgtcctctgtctgccacattcctggtgacctggaaggtcagtcacaggactgcatttcagtaaattccctcttccctgtttagctgtgttgcacgtgcgtcaaggttatggcgcgtggggattgtggaccattttagttttctctgtatgatttacttcctaagcatgtcatttccaaaggcacaaatggctgggcatgatggctcatccctgtaatgccaatactttgggaggccaaggcgggaggatcatttcaggccaggcgtttattagcagccagggcaacatggcaagaccccgtctctacaaaaagtacaaaaattagccaggtgtggtggcacacacctgtggtcccagctagttgggaggctgaggcgggaggatggcttgagcccaggaggttgaggctgcagtgaaccgtgaccgtgccactgcactccagcctgggcgacagagccagatgctgtctcaaaaaacaatagtttcttaaaaagtgcaccaagttgcccctagggggcggtggtgggtgaagtgcctgagtccctgtgctgagagtggctcccggtgtcacggctccaccttccagatggaagggctgtctgggtctccccagcgtgggttttgatgcgtaacctgccatgggcttttgtcacctgacactgcagggtgtgctgctggcagctgtggccacgtgctttccagacgagcccccgcaaccccacgaggtgtggggagcccccctttttattatttatttatttatctattttttgagacaggatcactgtcacccaggctggagtgcagtggcgcaatcacagctcactgaagcctcgacctcccaggctagagtgatcctcctgcctctacctcccatgtagctgggaccacaggtgtgtgccaccgtgcctagcgctttcctgtcgtacagagcacaagtttgaggcatcccttgggccgtccagccctgccccaggccctgtccttcctgggcccagctggtctgggggacatgagagtgtggcaggccccatactgcataggtcaccctgtggccagtcctgtggggcaggtgggctttgatgacctggaggtcagagcctgcagaggggggtgggccagcccctcacatgactcttacttgagggcttcctgggagctgatggcccttgcagtgggttacagggaggcaggaagaggccatgtgtgcaccggcctgcagagaggcagccagggacaggggctgctgggtgcacgagggtcccagcgcctccaccagctgccaaagcgcagggggagactcatgcggtcatggcagtgccctggcatagcatgcagcccagctgtgtgccgtgtggcctaggcccacaactgcccctcgtgggcctctgtgcctcctcaataagctcagtcgaccatgtcatcatctgtgatgcacagagcagggccagggacccgggaagtgctgatgtggggaccactgtggccaccaccgcatctgggcactgtttgtggcagatccagggatggcctcaggcctttggcccggcctctgagggctggggaccagtaggaggcctgaggtgaccgcgttctgccacccagtcctcccagagggctgccctgacaggtgccttggcagctcccatcgtggctactggcccagctcaggccggcactgagggtcccacagtggtccagctgcggcctctgctccctctgagccggtggctccctggggacagtgcgcaggccctgggtgaacactacatggccacatctgggtgagagcgggagggcaggtgcagcgttggggggatcctggggcctgtggggttggcggggtcgcaggtgaggattgggtactgggacctggctgtgggcgaggggcccgctgggacagtgtggtggcctgggaggccccgcgcagtcagaggctggtctctgggcacaggcagctctggtgactgtgacaggtgccttgccttgacacacactgtgaccgtctagtctacatttctaggctgcacgtggtcacgtgccgtgcacggtgcacttggggcctcctgtgcagacactggctttgcggctgccccatgggagaagctgcgaggactctgcacagagcaagggtggcgggcagggcctcagcccacgtgggcttggagctgtgcggttttgtcaaacccagtgggggtctctcagcagcagcccagcgcggggtgtgacgtcagggctggggctcagcgctgggtatcagccctgtgtgctgcaggcagggtatggggtggacccaaggcagtaggtggaggccagggggcgacctcggctttgcttttgtcaggatggagggttctggacaccagtgcaagcctagctggggcctccctgccgtcctgctcagattcctgggtgcatgctgccctctagtgcccgcagtggggagtgccttcaggagcgggtggctgcaccttggtggctgggaaccccactcccgggactgtctgggcggctccctgccttgtttccttcacactctagatcactttgggggtcacagcgtggggaggtggattttgttaagttttttctaagtttttgggtttgtgtggacttgggtccttgtttccgaatcctagagggattctgtcgtctttctgcctttggagattgaacctgccaaggaggacccttccccagagtctgtgatcaaagtcccttcctggtcggggtgggctaccagttcccaccctgcaacacctgggacaggagggagccgctcccgcccgcagcctccgtggagaggacagtctgactccgatgtttccaggcgggtgccgtcagtgaatcacttggcctggtgcaatcccccattctgtacagggctggtgggctggtttatgacccgcgtgactctgggcagctatgatggcaggaaatgagccgtcttgggcgggcctgctgctctcctgggtcaaggttcctgctagggcctgagttctgctggcagcagccagccagccccccgtgacccacaggcctgctccgaggggtgggtccccctgcccttgagcgtgtgaccctcacccatggccgccctcaccttcgaaaacccgcagatgccgcggtctctcgtgcggatcaggctcagagcagagagactgatgtgcagcggacgctgacacacctgtggcgtccctgatacgtaaacctttctctccgaggccccgcttaaaattagcgcactggctcccggtgtcgcctcggccttagaaactaggacgcctctgcttctcgttagctgcagccctcgtgccttttatgctcagcagagtgacgaggccgctcgtggttttctcttctgccctcactcagccgcgagggcccagccgcctttgtcctcctggtggccacggtatttttagcacgctccgttctgagggaggacgggctccaagggctgggcatggcggcaccgctggttcaccctctctcgtcttcctccacaggtgtgcttcccgcacagctgcagccatggggtctgaggaccacggcgcccagaaccccagctgtaaaatcatgacgtttcgcccaaccatggaagaatttaaagacttcaacaaatacgtggcctacatagagtcgcagggagcccaccgggcgggcctggccaaggtgggtgacatcctggccccagcgcggccctccatcagcctgcgccgcgggcctgcggacatcctgggtcccagctcagccagccccacaggcgtggcctgtgcacgtggaatgtgtttcggggccactcccagctcgtttaccagcgcctgtttgtggagttccaacaatgtgccaggcaccattctaggcactggagttgagaagtggccggtgcaggccctggctccagggagctggcagggggtggtgaggacacacagccacactgcagtgaagcccaggggcagtgggccaccaggttgttctggccgtgagctgacgtctcactgagggacgccttccaggggtgttcagtgcccaggaaggccttactttcctagtaaaactttttttttttaagctgggtatggtggtgcatgcctgtggtcccagctatttgggagggtgaggcaggaggattgcttgagcccaggaattagaggctgcaatgagctatgaccgtgctactgcgctcctgccccggcagcagagcaagaccctgtctcaaaaaccaagtcagaccacaccagaaacaatctttttgagatggcagagtgactgggtcaggaaaactcaaacagggcgacagcgcaggtacatagtgaccaggagcctcctccctgtcccgacccagtcccccaccctctccctggaagcagcactgttattggttcttctctctctctctctcggcatattgtgcacgcgtgtacgtgaatacacacagcagacccccgaaccccacatgctgagtatgtacagtaccattctgctcgtctgggcatggtggcccaggcctgtaatcccagcattttgggaggctgaggcagggggattgcttgaggccaggagttcaagaccaagctggccaacacagtgagatcccatctctactaaaaatacaaaaatgagccaggcgtggtgttggtacatgtctgtggtcccagctactcgggaggctgaggcgggaggatcacttgagccagggaggttgaggctgcagtgagctgagattgcaccactgcactccagcctggacgacagaggaagattctgtctcacaaaacaaaacaaacttaaaagttggtgctgcacgtttcacggctctgaaggtggctgccgtggtccgtgagtctctgtgttcgggtgtgggcctgttcgagcagtgctcacccctcagtttggaagatgaatcgtcgttgcattttgggttcttccagttgcctgctgtttgactatcgctgttcttcctcagttaggccaggggttggcgggcagtctctacacacggccagagggtgaacgcctaggctctgtgagccagaaagagcaaccagacgccgtgtgaatgaaagtgcacggccctgtgccaatacaacattattcctggatgctggagggcaaacgcgtattgttttcacgtcttctgcttttttcttttcccccaaccacttaaaaatgaaaacaaacaaacaaaagccttcataactcaaaggctatacagaagcaggaaggggctgattcggcccgagggccgcagtttgctgagcgctgaggcctcctgcctttccgggccgcctccaccctgcccctccctccactccctggttttggtggattttgtcagtagccttcgtctctctcctagtgatccttcggtatcagactcgcattgttatttctttgtctctgagctgtagagcgagggaagcagtctcgcaccatcttttcttcccctccaagatggatgttttttctgttttgagagggggtctggctctgtcgcccaggctggggtgctggggtgcagtgctgcgatcacggctcactgcagccttgacctcctgggctcaagcagtcctccagcctcagcttcccgagtagctgggaccacaggtgtgcaccaccaagctggatttttgattgtaacacaccatgacgatgtgggaatgatggcacatctgtgtccgggtcagaacggtgggggctgctgccgtcccggcttcagttctgtctttaaaaggctttggtcctcctatctcatctcagaccgtcttctctggccctctaggccacaggctgctatcccaggaaaggcccaggtcctcctcttcctcctctccctggtgcacatagggcaggtgggacaggcgtcgcctccctttatcctggcaccgcatctgcctctgtctcctgcccttgacctacttccacatttcccaggatgcagcagccctttctggcttgggatccaaggcgtcctgatgtcaggacgttgaggggaatcagcatctcagaccgccctgcgctcttccgaggtgcctttaaatgcccgccccgtcacttcttcctcatccctcacctcccaccgggctccatgccccggtgtttccggctctctctgccctccacgtggcggccttgggtgcagcctgggttcccgggtggcctgtcctcccccgcgctggcacctccgcttcgtccctccctccctctgcctccttggctgccgcctctttgagccctcatgtcgctgcttcaggtttctgcactccccccaggccagttcccccgagattcttggcaccggcgtcttaagccagtgtggggagtatggtttccctgccttgcgttctgcgtgttccttcccatgcctctgcagcggcagctcccatgctgcttctccttgcaccagtgcagagaatcctttctcaaacccgtggagggggctgggcagtagggggccgtccgggtcccatgctgtggaggggctgtgtgtgcacgtgtctctgtgtgtgtgtgtgtgtgcgcgcgcgcgcgcgcctgcgcgcacaggagactgaggtggggaggcagctctcacacagcccagagagcttggcagctgcagagtcacgttggcacccgcatgtggcacacgcacacccccttctgcagctctgtggggacagatgggctcagggaagcatctgctctggccctgggcagccctgcgtcttccaaatggggggcccttggctcggggcagccagcctctttggagaaggagcacagtgccctgctggttctgagcgagctgtgggggtgttggggtccccctctcaccctggtctgcctgccttgaccactgtgtgtgtgcgtgcatgtatgtgtgtggtgggggagctgggggtttcctggttccatcaaaactgtgtttggttatacatcgcccctgcccccagcagagatctgcaggcccgatggagctcggtgggggcgggagctgcgggcacagccctgagagggccctggagctggcggtgccctgggtgcaggaagccttccactggagttgctgggccctccacacggggtgtccccgaccacttgggaagcactgaggtgagaggagccctggaaggccccgtcgggggtcctgttgggaggggtgggaacttccagtgcccctccacccccaccagctgcctcccaggcgggtgccagcaggggaggccctggctgccctcagctataccacccgccggcatctgcctctcactgttggcatgtggccggtcgccttcctggcctcagctgaatctggccccccaggagccccgtgtgaggcactttcaggggccgccggaggcctggaagacccgagtgtggcagtaggaatgtcccgagcggctttcagtgcctccttttcaaccctccccgcctggagccctccttctggatttgcgtctcggcagattgtgggatgtcacttctgtcctcttccgccctgcgggattttcccagagccttcgggtttgagcccagctggaagtggccctcgttcacgctgcctgtcagcacctgcctgggctgtgtcacctagagtgtggctccgtgtgtgcggcgcagacaccgtgggggtgtttggagcttcctgcgtggctcccagatgtctttactacacagtgcccgccgtggaagggacagatgagcaatgtagcccgaggcgttctttcaagagcagaggaatcgggagcgaagtgtttttgttcatttagcagactaggatcatgggcgagtttcctctaatagcactgaagaggcgaattcacggcttcccctcggccagcggctttggcgtggatttggagccgggccaggttcatggaaccctcctgcagaagcagactggggcttcctggagaggggggacagtgtctgtgtgattcagagcagtgctggcctgtgggtctctgaccataccactcagttctctgtagtaacatctcgtgtctgggacacaggcccttttgtttctgtttctcgcctttccactcctcaatgtcttcgtgtctcactgactcttcagctgctcccctgaaatctaagagaacggcagccccgcagctgccccagcaccctgccatcacacagcctgtgccagggacaggtgccccaggcgccttttgcactgtggccatagtggacatggagagtctccagaaagagccggcgctaagctggactgtcctttccttgggaccggcctcatcttggtttaactctaaattagtgtttctcttcgcttggcactgtggacttggggccgcatcgttctctggggtggcgccatcctgggcattgcagggtgctgagcagcttccctggcctccatctacctcatgccaggagcaccctcagtcgtgaaagccacagacatccccagacatggccaggtgtcccctgggggacaagaccccccctcagttgagagccacctgctcgctgcggctgctgctgctgttactgcttttgctaaagaaacctgtgcatgccggccacggaggcagcaccttcctgtcgttaacaggcacctggaggataagtgttttcattgccaagcaaaacagtttcttcactgatgtgatcgctgggtccttggggacagtaaatggattttagccgttctggaagctgccagcgatgcaggcgtcaacacacagctcttcccttggtggcccggggcgcggaggggcagcttgccagattcctggcagatgagccgaagcgggtgggttagttccttctccctgtgcagtgggtggcccggtcgactcctggaaggaggcgtggggcctgcagtgcccaccccaggactgggtgtggcagccccggagcggctgggagggcctgcacagaagggtgcctggcacccagaaggcccgtggtgcccaccggcagtctagaatctggtcttgtcggcccataggctcacccccaccagaggagggaacatgaggctggggacaaggccaggagcccagggtgaggcgtgtactccggatagccctggtccctcagctcctggatgtctccagaaagagccggcgctaacctggactgtcctttccttgggaccagccttgtctcggtttaactctaaattagtgaaggcaccgggttccggctgcagtgccgcctctgacaggtgctggtccttgtcttcctctgctgtcttctccgcgtgttccagtgtctgaggtggcccaggacctctctggggtggaagtccacgtggccgccaggctagaggtcctgggccatagtctgtctgctcaccccagggtgccccgggctgtgttgtggatcgctgtgtgcctcagtttcttcagcggtcagatgggagctctgccattcctcccacccaggagatgggtgcgctgggccccagcacgctctgcacagtgcccagctccgcacagctcctgtcctgcctcacggcccctgtcccatgtggtgctgtcaccctccctgcgcctgcacttcctgttggctcactccaggcggggcggaggcccatgggggctggatctgtttcccagtgtttcctagctcctagaacttgggttgccccatagtgggtctcagccaagtggagccactggggatagtgtctgggctccaacccctgttctccaggtgcatgtggcccctggtgggctcttggtagccagtgggtgcagttctcacttcctgctgccagagggcattgtgagctgcagcgcttatgaccaagcatgaagattcccgttttgaaaaatgccttaccagggcgcagtggctcacatctgtgatcccagcactttgggaggctgagacaggagaatcacttgaggccaggagtttgagaccagcctgtgcaacaaaatgagactccatctctagagaaaattaaaattttttaaaaaaattagctgggcatggtggtgcaagtctgtggtccccactactcgggaggctgaggtgggaggatcacgtgagtccaggagttggaggctgcagtgagctatgattgtgccactgcagtccagcctgagtgacagcaagaccctgtctcaacaacaacaacaacaaatgcctcaaaatacgagtctctgagcctcaagatgccagaacacacacacgcccagtgccacctatgtttgctgagtctaatcctgcacacacgtgtcagggttggccctggtgctgggggggtgctgtacccagcttcccaggcctggaggatggctctgccctagcaggtgaggcccttgttggctgcagagtcttctggggagtttgataaggcaaatgggggggttcctcgtgcccctggggggtgtcccgaggtgcagatcttggggggtgctggtctctggggagccggtggcacagtctgctctctggccctgccctgagggtctgagggtgccactgactcccatcttggtcttgcagatcatccccccgaaggagtggaagccgcggcagacgtatgatgacatcgacgacgtggtgatcccggcgcccatccagcaggtggtgacgggccagtcgggcctcttcacgcagtacaatatccagaagaaggccatgacagtgggcgagtaccgccgcctggccaacagcgagaagtacgcggggcgggcagggcggacctgacccccgcccccgggggcacacctgctcatgggggccctgggggcagagaaggtgcggtacacgcagcccccacagcatggccggcctgctctgtgtgccccgtgtgggctgtggcgacccctgctcccagggtggatctggaccctctcccggcctgggctgacccacaccgccctcatctcagtttcccagggcttcccagtgcatgtcgggcggtgtcctggtccccggcctgggagcacgtcctccacaccctcctgtgacacctgggcttgtggcccctcctcagagagggctccctggctccacacgggtacatgcacaggcacacaggagggcacagacacagaacacacgagggcacatgtaacacacatgggtacacagggcacacgcacgtccatacacaggcacacacgggtacacatggcacacgcacgtttctacacagggacacacaggctcatgcacaggtacacaggcacatccatgtgggcacacctatgggcgcctacccaggtacacatggcacctgcgtgtaccggcagtgttccgagtacagctccctggttcagcaggcacagccacgtagcctccgtgctgcgcaggcctgtcccgtcgccgtgccctcctctctgtctgtggcctccaccctgtctgtggcctccaccctgttgctctctgaggttcacgtgccttgtggctctggcaccagagcagagcctggtctgtcctgctcacccggccttcccagccccctagtctgtcgtctgagctcagtctttgccacacagggatgacaagagcctcccagggcctctgtcccctgcccactccccctggcgtgtgttctgatgtgggtgccccgggccaggataactgaggaggggtacgtgggtttgggccactgctcgcccgtggaagtgcgctgtcccacccggaagcaggttgcgtggtaccctaggcggggcagcgggcagtcggagcagagcccctcccgcctctttcatgggtgccctgggttccaggtggctgagggtgggctgcgtagcacccaggcctcaccctgagctggttttggggtgtttgttcaccaggtactgtaccccgcggcaccaggactttgatgaccttgaacgcaaatactggaagaacctcacctttgtctccccgatctacggggctgacatcagcggctctttgtatgatgacgtaagtatgaggctccggggaagaacagggaccagcttcctggtgggtggtggtgggagggccctgaacgggactctgccttggcagatgaagcttccaggcaggcaaggttaaccccctcgcccaggctctggatgcgggcctcgccctgtggtgacgaaagaggaagccaggctttctctgatttttgcagggcccctcctgcctcaccctgcagcccccaccctgagctcaccctggccccacctctggcctcagcagccggcccacagcgtgttacaaacacgtgtactttcccagtccctgccgctcgtcttcctggcactgtggagcctcgagtcctcagcccgccaggccacctgctggattcggctccaacccggtcctgacttgggctcagggcccggagacactggggtgaggggatctcccatcccgagcctggtctgctggagcgtcctcttgtccacacagcctgggctctccatgagggcagctggccggcatccccagagtcccagcctcaggcataaggtcccccaggccccgctggacgccagaagtgggcctgcgtggcgggtgtgtgtggaacagcagcaggaagctgtgactgccctgaggccacggccagccttggctctgccctgcttagtggaccttgtctgcgctgtggcccgcaggggactgggtttgctctctgagccgagggcgccggtttatgacacggaggattctgttcaggctggaagtgagcccgccctggagaacctgagggagacgcccccgacatggagccaggcataagccagccttgcttccggccccaccagaagcaaacatgagaccagagtatttcgaatttgagattttctttttttgaatatttgcatatacatcctgagatatcttggagatgggccctaagtctggattagtctgttcttgcactgctataaagaaataactgaggctgggcgtggtggctgacgcctgaatcccagcactttgggagactgaggtgggcagatcacttgaggtcaggagttcaagaccagcttggccaacatggcaaaacctgt[132 bp omitted]gccccgcagcctgggcaaaaatgagactacgtcacaagaaaaaaaaaaaaaaagaaggaaacaaacacctgagactgggtagtgaataaagaaaaggtttaattggttcacgtttttgcaggctctgcaagaaacatggcttgggaggcctcaggaaacttagagtcgtggcaaaggtgaaggaggagctgatccatcttacacagcaggagagagtgagggggggggcgccgtaggcttttcaacagccaggtttcgcgagcactcactgccctgaggacagcaccgcggggatggcgctgaaccattcaggagacatgagcaatccacccacggtgcagccacctcccacccggccccaccgccgacaccgggacctgcagttccacagactcaagtctaaacacaaaattcatctgtatttcgcgtacactttacacacgtagcttgaagataactttacacaaagtttttaataattttgtgcacgaagcgaagttttgactgtgtcttaactgtgaccggtcacatgaggtcagctgtgaaagttttcacttgtggcgtcgttatcggtactcagaacatttgggaccttggagctttttgggttttggatttttggagcgggggtgtcccccttatcccgcacggcgtttatcggagtggggtgtccaccttgtcccgagtggtgtttatcggagtgggggtgtccaccttatcccgcgtggtgtttattggagtggggtgtccaccttatcccactctgtgtttatcggagtggggtgtccaccttatcccgtgctgtgtttatcggagtgggggtgtccaccttatcccgtgctgtgtttatcggagtggggtgtccaccttatcctgcgcagcatttatcggagtgggggtgtccaccttatcccgcgtggtgtttatcggagtgggggggtccaccgtatcctgcgtggtgtttatcggagtggggtgtcaaccttatcccgcgctgtgtttatcggagtgggggtgtccaccttatcccgtgctgtgtttatcggagtgggggtgtccaccatatcctacgtggtgtttatcggagtggggtgtccatcatatcctgtgtggtgtttatcagagtgggggtgtccaccatatcctgcgtggggtttatcagagtggggtgtccaccatatcctgcgtggtgtttatcggagtgggggtgtccaccgtatcctgcgtggtgtttatcggagtgcagtgtccgccatatcctgcgtggtgtttatcggagtgggggtgtccactgtatcccgcgtggtggttatcggagtggggtgtccaccttatcccgcgtggtgtttatcagagtggggtgtccaccttatcccactctgtgtttatcggagtggggtgtccaccttatcccgtgctgtgtttatcggagtgggggtgtccaccttatcccgcgtggtgtttatcggagtgggggtgtccactgtatcccgcgtggtggttatcggagtgggggtgtccaccttatcccgcgtggtgtttatcggagtggggtgtccaccttatcccacgcggtgtttatcggagtgggggtgtccaccttatcccgcgtggtgtttatcggagtgggggtgtccaccttatcccgcgtggtgtttatcggagtggggtgtccaccttatcccacgcggtgtttatcggagtggggtgtccaccttatcccacgcggtgtttatcggagtgggggtgtccaccttatcccgcgtggtgtttatcggagtggggtgtccaccttatcccgcgtggtgtttatcggagtggggtgtccaccttatcccacgcggtgtttatcggagtgggggtgtccaccttatcccgcgtggtgtttatcggagtggggtgtccaccttatcccgcgtggtgtttatcggagtggggtgtccaccttatcccacgcggtgtttatcggagtgggggtgtccaccttatcccgcgcagtgttgatcagttcatccgctgacggacatttgggctgtgttctctttttggctattttgaataatggtgctgtgaacgtttcttgtgtgtttgtttctttgtctttgagacagagtcttgctctgtcacctaggctgcagtgcagtggcgcaatctcagctctctgcaaccttgcctcctgggttcaagcgattctcctgcctcagcctcccgagtagctgggattacagtgtcacatggagtcatcccaccactctaatgatcccctgagctccccctcgtcattcctccctctcccccatccctctcctgcgccccaggcaaccactgatgtctcactgtctccatagctcagccttttccagaatgccgtgagctggaatcctacagtcggtagccttttcccattggcctctttgaccaagcaataggtgttcaagtttgctccatttttcatggcttgagagctcatttcttttcagcgctgaataatactccatggtccgggtgcaccacagtgtgcctgctcattcacctattaaaggacccttccaagtttggtcaatgtgggcagaagttttcatctcctttgggtaaataccaaggagtacagttgctggaccacgtggtgagaggacgtttagttttttaagacgccaccaaactgtcctcccgcccacctgtcccactgtgtgctcctagcagcagcgaatgaacgttcccagggccccgcttccccgcccccatctggagttgtcggtgttgtgcatcctggccaccctgggaggcgtgttgcgctgtctcattgccatttcaatctgcattcccccgatggctgccttcgcggcggggcccctttgcatgcctgtttgccatctgtgtgtttccttggtgagctctcttcatgtcttttgcccagtttgttgttgttgttgttgttgtttgagatggagtctcgctctgttgcccaggttggagtgcagtggcgtgatctaggctcactgcaacctccacttcctgggttcaatcatttctgtgcctcagcttcccaagtagctgggattacattacaggcgcccaccaccacacccagctaattttctttctttttttttttttgagatggagtcttgctctgtcaccaggctggaactacggtgcccaccaccacgcccagctaatttttgaatttttagtagcgatggggtttcaccatgttggccaggatggtctcaatctcttgacttcgtgatctgcccgccttggcctcccaaagtgccgggatttacaggcatgagccaccatgtccagcctaatttttgtatttttagtagagacgaggtgttgtcat[134 bp omitted]ttctggttaaatttgagagtttgctgtgtattttggttatcagttgtgacttgcaagtattttctttctgactggggcttgtctttctcttacggatcctgcctgattgttttcaagtgaaagttcagcctcagactccagtgcatgagagcctctgggttggctggcctgcactgcctgcacttggcctgtagtgatgacccgggagggactctgcagccgcacgcaggctgtgccagcccaggccgacctgccacaggtgccaggggaagcttcagggcttccttgccatgtgtttgccatgcctagcctatgcactagcctacttttacagcgggggaaacagcccacagcagagaagcgacttgctgtggtcccaggatgaatttgcgcccagctcagcctgtgcctggggcctccctctgccccatctgggtctcatcactgcctccctcctcacctcttctgggctcctgccagggctcaccttgcaaaggaaccgctggtcttgccaagtctgagggccggtcgtgcaggtgcaggaacagctggtggggggtggattcaggctgtgagagcagctcacgttcatgtgtgtctgggctcctctcggcctctcagcaggccatgagcctctccggggactgcagtgactaatgtgtattttatgagctcttgggacaggacggggtttgtttgcttgtggcattaagaatagatgtgcctggtgggtggggattccgtccttgtttgcctagttctgaaaactgtcttcgtctcctcggtcagaagctgtggaagggctgtcactgggccttggctccggtaccatcgctgggttagccccaagtggtgactgtttttctccttccgtgtcattgacttagaggcgtgttaattatgcactcccaaactgcaggcttcacaacaaggcctccacccagcaggaagcacgcagctcagtggaatctgacaggccctgcctgcctggtgcacgctggcatgtgcgatggggcccttcctggaagggccaagctggcggtgagcccttcagaaaaggtgtctgggctgggtatggcggctcatgcctgcagccccagcgcttggaggggccaaagtgggagggaccattgagcccaggagttcgagaccagcctgggcaacagagtgagacttcatctctacacagaaaaaagtaaaaattagccaggtgtggtttctcacgcctatagcctatagtcccaggtactcaggagactgaggctggaggattacctgagcctgggaggttgaggctgcagtgagctatgattctgccactgcactccagcctgggcaagaatctcacacaggttaagaccagcccctggtctgcagggtatgaccggcccctgggggggccgcagatactggggtggaggaggatgggcagcgacccctgggactctggggagaattagcctgcaccccagggctcgcaggttctgggggtggccgggcggttgccgacgctgctctgccgccccacaggacgtggcccagtggaacatcgggagcctccggaccatcctggacatggtggagcgcgagtgcggcaccatcatcgagggcgtgaacacgccctacctgtacttcggcatgtggaagaccaccttcgcctggcacaccgaggacatggacctgtacagcatcaactacctgcactttggggagcctaagtcctggtgagtgtctgcactggccctgccgccggccggaccgagagcccctcgggagggagtcaatcccgggtacacggctgggcgccgtggcaggggccccaccaggtgaggccgcaaaggtcggcctatgacggctggagatcttccggaccgcctggggtcacccaccagctttggggtgggggatgtgcacccccagagccgaagctcccaggcccctagagcttgcgctttgtaccccggagtgccccccattgagctgtgagcggccccaggtgtccccatggccaggagcgtggtcttgagcctcctgagctgcccaggctgtgctgcctcacagccaagtggagacgttcctggtgaagggacactgtccatgctgcccagaggggcctggccaggatgaccctgcagccgctccctcgcagtctccgccctggcacgtctgggccaggccctacagttaggagggcagggcgtggcgctgcaggcctgtgtgcagtgtggtggacctgcccctgcccgggaggtgccgggtgcagcgtgggcgctgctgtggcgggctgagttccaggaccttctcctggctccctgtgcacgtcgcagcgaggccgtgtgggggtgtgtgtgaatgtgcacgtgtgcgcgcgcatgtgagtgcgcacgtgagtgagtgtgagtatgcatgcgtgtgtgtgcccctgtgtcaccgggctctgcttgtgactgcggaacctgctgggtgctccgcggggctgccctgcactgtcctccaagggccgctaggtggcgctcccgcccttcccggggccgcgctcatgcctggaatcttcccaggccgtcctcgcgctggaggaggacggagcctttgcctggagggcgtgggagctccgccttgcctggcccttccctgggttggagttgtaagcggggagaggggggggcgggggagaatgctgtacctcttcgttaaaaaaaagcacaatgagcaggaaggggcgagctgtgcgcatcctcacctgcgtccgaagcgcagatggagcccaagggaaaggccctgtagaggaccccgtgtgacttggggcaaagcgtggcctcccaggggtgcgtgggcagcgggacgcccatggtgtgaccgggtttgtgcctccatagggaccgtctgccctgtgcagagagcccctgtggggcgggaagtggcgagcagccggcaaggaggcccagccagacagaagcaggggggtcagggacatgggaggtgggggaccagccagtgagtcagacgtgaggacttcagtgccaaggactgcagtgccagcagctcggtctcctgtgaggggccccgggggttgctggctgtcgtgggagcctgggctgggggagaccctggggctggggctgctatgggtcagatgccagggccgggggtgcctgctgctaggtcagaggggcctctgcgggaggaggcgacagtggctccctggaggcggcagtggggcccggccacaggccgtcggagggactgacagggatgcgccaggagccgagggcctctcctgagctggttcatccaggacgcagcctctgagggcatcccgcacctctccccgaatgcccctcactgcacccctcctctgcttcgcctggtgccgcaggcgtccagctgccactcccatgtctacccttccccatgacccgtcgtgggagatggctcaggggagacagctggggcggggcagcgttgagtaggcaacagttctttcgggaagggaattccggaagcgccctgaccttggtcttggtttttgcccaggaaggggtggggatggcaggggtggggcctggcatgaggggcctgagaggagccacagtgtaggctctagctgcagggcatgccctcaaccccccagagctccccactcgcccccacagtcagctcagcctgcttagcacgcagggccccttccctgctctctcaccagggctgaggcggggccccagatgttcccacgacaccccatgcctgcgacaggcatagaccaggtgaccccagcattagccaacgtctactacgggctatcagtcctccccagcagatggtaggggccctggtcaccccgtgtcccagctcccagcaggggcctggcacagagaggcttggtgacttgccggagcctcttggatcctcactgtgtgctgtgggagctgactacccctccaggctgccctcccaacttgcaggggggtggggacaaggtaactggaaagagtgtctggcctctggtccctgggctggggttcaggaagctactcaggcccctgggagatgcttcccccctctcccttcctcgggcccttggggtaggtagggctcccagccaagagatcaccaaggctgcgccccgtctgtctccctcattacactgttccgcttgcatctgcagccgcttaattgcaaccatttcagagtattccagtgggattttaaagaaagtgtcaatgtactcaggtttacagcattttattaaagctttctgggtctgttgctactttggtagcttgatttgtgtgtcaaagtgacgtgaacagcctggtgtcaataacaggcagaaacatgcttcaaaaggctggcttctgtggtgctctcaggcagcggggctaagaatatctgaagagactgagcgcctcaaaatctctttggcaatgcggattgaaaccagagccagcacctgcaacttccccccgccaacttcccgcagccccttctgtcacccaggccgggggggccggagtgcaggtgggtgtggggagggtccgagctttccacttgaccctgtattccagggtcttcctgggtggggtggtggcctggggtcggtgtcctgaaggctgtgccccatagaagccactgtcccaggccacactccttgccatagatcaagactctcctggggccaggcgcggtggtttgcgcctgtaatcccagcactttgggaggct[134 bp omitted]gaggcaggagaatggtgtgaacccaggaggcggagcttgcagtgagcggagatcacacccctgcactccagcctgggcgacagagtgagactccgtctcaaaataaataaaaaataaataaataaaaagaccctcctggaacctggggtgggggtggtttagccgagctgaccctccaaggccggtcctgcggctgttcccctccaggcatcccctccccaacctgcacctgtggcagcccctgcagggcccaccctcctgagccgcccgggccaggcacgaaacacaggcgtcgccacgaggctgagcgcagtgtcgccagcagcatcacatgccacatgcccctagaagagagttccaggccggggtgggaggatgttgggtctcggccagccctgagagagttgctggtcccagggcacttctgggtcattcggattgtgctgtgcaccccaaagaagagagtggagtggccatcccccctcgagggccctggcccacgctgcctgggaaagtgcccactgttcagtcctgtgcacccatgtgccgggctgggacctggccgaggcttcgggtccccttttgcccccaacccatcagacaccctgcagggcagtgttggggtgtttaggggactgtgggccaccgccaagagcagaagctttggctctcactgcagcagggaagccagatgggggatcagcatgttcctggggctgcagggactcccgaggacgtcgtgagctgatgggacatggtcagctgcttgcactggctccaaggcggcgagaggaaggccctcctgaggagtgccgcggggccagcgcaggtgcgtggcagccacagaggcctctgctcaggcttagggaagggggtgtcccccagggtctctgcagctccgcttgtcagaaggggggtcatcctgcacccaggtgaagcccccaagagcagcggggcgaaggagcgcttgcccggactgcgaccttgacctgcccatgacccgcggcagtctggaaatcccccattgccccaggcaggatgggggtcccccatggtctcatctctggctgtttcctcaggggatcgctccgcccaccctctcctgcctctgtttaccttggacacactcagtctccggtgcaggtgtgggaggtgggggtctcggagcttgtgctcccgtgaagggcacggagcccccagttgctcttggccatcctgggctgctatgagccagaccctcctgagtgctgcggggagggctgctggggaggccaggggagaggggattatcagaagactccaccagcctcccttgacctttaaggagctgcaagccgagaattttcccttttgattcagctacaccttgagttttctctctggcgttttccctcatgggaatttcacagcatcttttcttcttgctgccagggaaacttgagtcctagcaggcatagccgtcttttgcttcatgggtgtccctggaggtgtgcgtgcatgtgtgtgtgtgcatgggcgcatgtgtgcaccgaggaaccgtgctccagacactgggggtgggggtggggagggtgggggtggggagggtgggttccagggctgcaggggaccagcccgggcttcctgccctgtggccgcaggtgggtggaaggcagagcctggggtggatgagtctgtcgcccacccaggccaagccaggctgttcttggggtggaggctgcgggcctgctcccttacccctctgctgcccgcctaactgcccctcaggacctccctggcccacccgcctcccagctccatctcctgctggcagctcctgcctgggggcagacacctccctccctcctgggctccctcagtctggctgcaggtggcactgtcgggccccacaatggcctctgccctgtcccttggagtgggacccaggagtctggtgggtgatggagctggcgagcccgtcccaggcagcagcctgaaggcccatggggtagcgcgctggcgcccggggaccctggtgtgggtttgtactgctgctgctggcgagccaaccactgggacttccagcttctgagcccgggacccggggggtcccaccagcagtggggacctagggtcccagtctactgaccgtaaggcatggcccccctcagtgacctggggcattcctcccagccgctttgctctggctgggccaccagaggttgggtggccgcagagacagctctggcggagattggtgtcccgacaggggtggcgtagcctgagctgagcactgggttgaaatggaaattgcctggagcctgacagcttcacagattggttttaataactcagcttccccacactgcactctgtcaccagaacaagatgcaggagcgagatagttgctccctcctctccttgccacccgaggcccaaccctggcgagggtgcctagggacagggctgcattggcagctcagagccgctgcggtgccctgggaggtcagactgagaagacccaccagactgatgggggcagcccgatgcgtgcctcgctcccaggcaggggaccgcagccaggtctcttcccagccacacacactgagccaggatgacagaaatagaaaaggaagaagcggtttagaacagagagctcccacggagagcagatcagaccagtagggaggcagagggaccctggtcattagaaaatgataaggtgtcaggagccaaggcagcttgctcagggcccaggttcctgcccgccaaggcctcagcacttcctccctggctcactgagacccgctgcagtggccccagcccatggtccctgggagccgtatccttgtagagacagctgtctagcctgcatgaggttatctggggaggctcttgatgaggggtgtcccctctctgcagaaggaacctctttttgagagaagacagttgttgtcacaagcaagtgaggcccccaggcccagtgcccaggccagctgctacgcctgagtagtagttgccaccagcccagaccagccactaccccccagcagcgctcagcaccagcccaggggcccagcgtcccggctgactggctctgggtccacatgggttgctgcgtggccaggcacacctggtgcccagcttccctgtttgaggagcgtggccgtgggcaggcaggaagctccttcgtggtcacctgtcccaatcctctgcttctgatggcgactgtggccacagcatcagtgcagcggttctttattcctgtgcgtgagtgggcctcagtgaccagctcagctctcctagctttatttattttattttagatgaagtcttgctctgtcatccaggctggagtgcagtcgtatgatcacacctcactgcaaccttaacctcctgggctcaggtgatcctcccccttcagcctcctaaatagctgggaccacaggcacgtgcacaactggcaaatttttaaattttttgtagagacggggtctccccgtgttgcctgggctggtctcgaactcctgggatcaaatgatgctcctgcctcagcctcccaaagtattgggattgcaggtgtgagcccaaccctttcccagttttaaaactggaagtcccatatcctggaacctgctcagatccagtgaactgtgatgctgagtcccctgagagagagagaatgtgtgtgtgtgtgtgtgtgtgtgtgtgcgcgcgcatgcacatgcgtacacatgtacatgtgtttgttagagaaacaagggtctccagtcacatagtctgtctgggagggagtctggccccctgggactctgcccagaagacgagacctgggagtctgctgggtaactgagaactggactttacccacttagctgcgagaactcgggccaggagctgagctgccagcagggcattgcagccgtgtggcctagagcgtggcgtgtggcgctggtgccgtgcttgggtaagtggtccaggctgcggccaggagggccggcacatgggagctatgaatggcagctgtgttttccctggcctggtcccctccccagccctcatcatcgagccctctgcctcgctcttgtcactaccactctgtcggcctgacgccatcagcccaggcctgcttatcaagactggggagtgaactgagcaccagaagctggctttggcgttcaaaaaattaactcgtgatgctgcaaagacctttgagcctcacactggggcgtccacagcgaggctgggattgcatctctgcgcctggcgtgtggggcacaggtgccagaatcacagcttctccggctggcctgatcagcctcctgccaacctcactcacgttaagcaattgcggcccgattgtgcccccaggacaggcagggctctcagctgtgtctcgtgatggtgtccccaaggactgggagaacacctctcggccagggtgaccgggaaacccggggcacatcggggcactcaccggggctcccaccgtacctgtcagtgggatctgtcccagcaggctggctcctggctcttgctgggagctggcagggacagacacagacacacttggtgtttgttcggggactgcagagcaattttcatatcgccttttgctgtgtgaaaatcgcactccaagctctcctccagagccgtgccactgagctggggacttccggtgtttggatggtcgattgccctgtgtgtgtctggacagcaggcaccgttgcccatggatttgggaaactggcttcttggtgagcagagatggtggccgtgatgggggccgggtgggcaccccgcagcaggcgagtgtcaggcggtgggcccgtgatgggggctgggagggcgccccgcagcaggcgagtgtcgggtggtggccgtgatggggactgggaggacaccccacagcaggtgagtgtcctgcaggtccctcttctcattcttgtcccaggcttgtgcttgtgtttttcatccactttttggtgaagtcttctccccctttctctctctttaaataggtctttattagacctgttttagattcactgaaaaagtgggaaggtagtaaccacagagagttccccaccgggttccctgttatgagcattctatatcaatgtggtacacttgtgatcattgatgggccaacactgatgcgttatgaactaagatccattctccagatttcctctgtcttcccccgttgtcttttctgtcccctgaacccatccgggtcccacgtgatgttgtcccgtctccgtagggccctgggctattacggtgtgtttgatgccctggacagtgttgaggagggctggccagggagtttatagaacgtcccctaatctgtatgtcccctaatcagcatgtctgatgtttttcttgtggttagattggggtgatgggttttagggaggaagaccacaggggcgaagggccctcccatcacatcctaccaagggtcaaaggcgcagccatcagcgtgatgtcactgctgatgttggccctggtcacccggcttgggtgtggatgtccagtgtctccactgcagagtggcactcccccgctttccatgctgtcatctgtgaatgtcaggcccaccaggatcatctccctttctttcttttttttttttttttttgagatggagtcttgctctgttgcctaggctggagtgctgtggtgtaatctcggctcactgcaacctccacctcccaggttcaagcgattctcctgcctcagcctcacgagtagctgagattacaggtgcgtgctgccacatttggctgatttttgtatttttaggagagatggggtttcaccatgttggctaggctggtctcgaattcctgacctcaggtgatctgcctgccttggcctcccaaagtgctggcgttacagacgtgtgtcactgtgcccagccacctccctttcttaaggttaactgatttgggacctttatcacatcttcgagaccctcacggcagcagcacggggcatgtgtcactcgaggagtgtgggagccctggggcggggagtcctggggtgtctagagccctggggtggggaccctggggcggggagtcctggggcggggacgctggggcggggagtcctggggcggggagtcctggggtgtctagagccctgcctgtcccggggcttcccttttgtaggcatttcttgctgtgaaacatgatttggtacagaaacggacataaagcatgtaagtaccagatatatatgcgtgtgtgtgtgtgtgtgtgtgtgtgtgtgtgtgtgtgcgcgcgcgcgcgtatgttagcaaatgactctccggctgtcccctgtgtacctcgatgtcaggacacggcccccacctgtgcctccttttcccagccccctctgcacactgtggtggtggcttcctcccggctctgctggcggcgcccttgcctctcccctttgccaggccgcgtgtgcctgtggcccgggcagtgaggctgtgtgttggctgcattggaaggtcttacaaatgggctgatttccttgcgtttctgctcaatggtgtgtgtgtaagattcatccggttgtgtgtggtggcagtgcactcattgtcatggctgtgaaattccccactgtatggctggactttagtcgactttttccattctgccgtggacggacatttgggctgtttccagcatgaggcttctgcgaaagacctatcatctcttcacctgctgctcatgtaagaaattcattttgatcgtaagccttgctatcagtaactgtgactggggctgcatttatgatgttccgttcctcatgcagcagctttgcctggagtaaccctttgacttgtgcccctggctccacgtccttgttcacggacgaggcacagattgaagagacgtccgatctgcccttgaagcgctgccctgtgggatcaggagggcagcgggtcctgggagcaggtgccaggacgatgtgcagccttgaggacagggtgtgtcccaattggcgagggtggcctgaacccgaaggtgtgggtgaggaaggagccatttctaatggagtcaccatattaagccctgcttagccaaacttgaaggtgacagtttgttgtgggacatggagatgatgcagggatgcggggaccgaggccagcatgtgtggtgtccaaggtcgccctgggtgctgctgtgtaggtgagggaagagggactgatgggctgcttagggggccatgtctgagggcagggcccaccacttctgcccacacctcattggccagcacccagtcacgtggccacaccttgcatcaagggaggctgggaaatgtagtctgaccacatgtccagctgggaaggggcaggtgagacttctctttcctgccatgtgggtgctgggtgccctgcaggggctcagccaacagggtcttgaggttgaagagatggatctgcccaagccctgacggagtgctcatgcctgctcagggcccagcatgagctgcgtcaggagcagaagccattgggaagggcttttggtgtggccgggcagccagacactccacgcgcaacccccagagcagtgccaggcccgggagcccttgggatggaggcagggagaatggggggctctgaggactgagggaggaggggagcccggtgaggggaggatgggtgaccagctcaggagcaggggcgggaagggggcatagaagcttcctaagcaggggagctactactcttggccatgttccaggaggatggagtggctgtaggagcaggctttcgggccagggcctgggtgtggtgggagccggggctggctctggaccctgcaggggctgccttagcctcacgctgtctgaccagcccctgcctcacgtcgtgtgctgagtcctgtctgcggcccctcgctcacccgctggcttggtctggcaggagcagatggccttcattttggagtcttttgttcaaagcgggcgcttcgggttggagtggcagtgcacacgctggctcgtgtcgcttgtgaggctgcaggatttttgttttagggaggtaggagccaaacaaacctggcgcccgcttccaggctgtggcatgccaggcgagtcaccggcatcctgtccctgcccaccgctttaagaaactgttagttctgtttgaaatgtcatcactgggcgtgaattcccatcttcagataatcccgccaggcggtgtttggatgaggagtttattcaggctgtgggggtctgtgcgtgcccgcgggtccctcccactgcagccggcgaggctggccctgacccagagtcgcccgcccacccagtctacgtaggcattagaggtttgggttctgagctcagggcctggtttccatggcaaatttctctcccttcggcgaggctgctgccggcggggttcagctccccagaagggagatggcagcaaatctgcgggaggagagtcttcgttatctttgcttaaaaattgggcagcgcatggcttcctcccctccacactcgccagcagcaggggacaggagcgctggctgccttctgatgaaacggggcgggcgcaggatggggccgatgacagcgatgctaatggccctcattcagcagcctcccgccgagggctcgggccgcttgttctccctgacctgattgcgagccaagcagacttaacccgtgtgtgagccaaaccctcccggagctccagagcccagcccgggtccccgaggcccagggagggacccagcatcctgcggcctctgcccgtggtgggcacaggctgagacttaggtcataggaacaggagcgcgtagcctcatggccatcggcctgtgtgtgagacagttcaactcccgtgctctccaaagctagtcccatcattacacgcgccatttaggacgctccaggccatctcggtcaccaggggcctggcggtcaccgtgtttcctcatgaggctcagtgggtgctgtgtgtctgtgggtgccggtgatgaaataaatgtaagcatagaggcatcagagcattttaatagatgggagcctccacagcctgcaggtatccagacgacgttctgcacacagagactcagactcccaccagggcctcacgccccactgcctctccgggatgcctgcgtgtggctcactcccaccacgggcacatcagccctggtgcccagctggccttctgcagagcctggtgctggagcagcttctcgaattctctgctgcctcctccccacagccttccagggcctcagagctgctgccaggccagcacctccttgggcccgtgttgaggccccacggggctgggctcatgtgggagctgatcttgg[138 bp omitted]tggtgaaaccccgtctctattaaaaatacaaaaattagccgggtgttgtggtgggtgcctgtagtcccagctactcgggaggctgagacaggagaatggcgtgaacccgggaggtggaggttgcagtgagccaagattgtcccatccagcctgggtgacggaggaagactctgtctccaaaaaaaaaaaaaaaaaaaaaaaaaaaaaagggagccatgattgttctccagctgcagtccctgtctcttcagaccctctgtgctcttaggagactgtcgttgttctctcctttttaaaccatcctgtgccttttaacagaataaacggcaaggggtccccactgaggtcgaataatgctggaggagggccgtgggtccaggcatggtgggggctgcctcctggttgttgatgagcagaaattcaggccggtttgacggcaggcacgtgagggaggttgctgtgtgtcagtggccctgtgtccctggcactgtgtccgaacctgacagccgccgctgtgtcactgggcacctgccctgcgcaccctcccctgtgacgggcactctcacagctttcctggcgaggctgagggaaaaacatggcaaacaactcgcacatgactttgcgtttttggccttgtcatataataaaagtaatttgtgggcctaaaataaatcagggctggggatcagatgcctccaatctggcctttaattgcaggcgtgacatggcttgcctcggcgagtctgctcctaattaaagtgggctggcggtgtatgaagttcgcacggatcctcagggtgctgacccagccccggttccggagggccagtgtgacgacacctcgtggcccaggagagcagggcgggccacccatggccaccgtgccaggaatggggtcttctggctggccctgcgagagccgagagctctgtctcctccgcctgctgctccgctttgtcgggcattcctgtgggcggctctccccatcccaggctccccatcttccctgagccgaggctcccaggactctgctggtctcctgtgtgtctcaataaaaggtcattatttgaaatcattgtcaccactggtttaagataccaaattccatcatctcttgtcccgtaaaacgatccattaaagataaagccactgcagctcaataaggctgtttcctgggaacaagccaccctgctccctggcagatcctatctcccaagcaagtattagtatctgccacataaaggagcccctgtgctggggacaaatgagggaggtggcctttccccaggatgaggctccatgaaagaagatttttccagtagaaacaggcaggttggctcatgcctgtaattccagagctttgggcagctgaggccagaggattgcttgagccagccactggagctcgagaacagcctgggcaacattgcaagactccatctctacaaaaaaagaagaaaaaatcagctgggtgtagggcgcacacctgtcatcttttagctacatgggaggctgaggagggagtattgcttgagcctgggaatttgaggctgcagcaaagaccctgtctcttaaaaaaaaaaaacaaaaaacaacaacaaaaaacaacaacaaaaaaaaacagaagaaagaaatagggtagctttccatcagatattggaggagttctgtcattgccttgggaggagccgtgcagcccaggctgggctccatttctgcagcggtggcatctgggggagcagggctggccccgcagaatgccagggctggagccttccccatggggcctgcacctgctctgggactcccgtttctcctgtgagtctttgcgaaagggtctcactcctcctcttcctgccctctgtccggtcccctgtaatctctccctcccagcaggctgcggttggtgacatctcctctccctctctctcagccaggatatgggacctcagtgctcttggcagttcccgggctgtctgtgtgtcctggcctgtggatccactcccttgcctgtgcaggcactttttctaacatctttatctctccagactgacctgtggggcagctgcctgtcctgggcgacccatcctcctggggtggccatcggtagcatgcctttcctgctgctggcgactacgtgatgagctctggcacctgcccttcctcccgtccgtccccatgcgctgttgcaggggtgtggaggggttttacccagggaggcactggcttcccaggtcagagcctgtgagtacagcaggcaagtgcactaccaggtctgtgtgtggccttgtttgtggagagaattcctgctccaccctagacgagggacaggtttaccctagtgggtttagagtgttctgttaatgttctttctgctgtagaggaaaccctctttttgttgacttttttttttaattaaaaattctgccaccttgctgggctgtgtttaattctatagttttaccagtttctttgtttgcttagatttcctaagtagaaacttatgttataattaaactgttttttttttttttttttttttagagatagagtttccctctgttgcctaggttggagtgcagtggtgcagtcatggctcactgcagcctcaacctcttggactccagtgatcctcctgcctcagcattctgaggagctgggaacacaggcatgcaccatcacgccttacttagacgtttatattatgattttaagaagtttgtcttatcccttctgcttggtaaaccctttgtctttttcttgatatatcacattggctagtgtctctagtgcagtgtgacgtgtgctgtgatgatgggcaggttgtgtcctctcctgcctcgccatgaaggtggtagtgggagagtccctgctagtcctggttgcctgagaatttttgtaccaaatgctttggaatttttgatagatattaatttttggaatgtctttgcaaccttggagataaactcttcttggtcttgcaatagcctactgtgcttgactcactaatgctgtatttaggatttttacatccacgtgggactggctgatcattttcttgcgtgttctttgttggtgctggggtttcccatttgttcatttattcatccatttggaaaatatgccggattcagaaaacgagctcagtaacgtcagatattccctactgcttgccaaccatgtgtgtacatgggcactgtccctttagatgaaggtcatcgggcaggattcattaaaaccacctgggctggtgccttttccagagaggacatctgtgacctggtctcttcagggtttctggtggggcctgtgttgacttggtggacaccctgggctccacagtgctgaagatactctgaagagccaagtgcatctgtggcactgagcccagcaacgcaggcagggaccgtggctctctggtccttgtgtccccagtgcggtgaataggtcctcaggttcctgtgaacagctttgtttgtggtgcagtttccatagcatacatagaaggcgctcagagaacttggccatttccgtggacggagttaacacggcgcagcacggtggccaccacacagacctgtgtgtccctggcccggtcaccatgcggctctgaggagcagagcagaggagccaccctggcccggctcgtctttagctggctccgggactgcatgtcggctgaggggctcgtgtggatgtggggctgagacagcagctctctgttgggtctcgcaggaagcccaccctgtagccggcttgctctccttcccggcctgtgccagccacagggcagtgcgccagagccatcttgctgggtcacaggccggggccaccatagggctttgttgcgagggtggcggtcaccatggcttttccgttctgtttgcaacttggggtcccgggggcgccactggcgtttggatctgccgtggccctcctgggcttgcgtgggtggctcactctgccaggtggcctctgtccaacctgacacctggtctcgggtacttccagcgtgacgtgcacgggctctgcctccctcattctgtgtctgcgatgatagcgcattaaatggcgaaggcccgtctgcccaggcctgtgcagacactgtgaaattaactttctcaccctccagcacgcattgggctgtgccgacatctctgaagggctcttggtcggacctctgctcttggcacacattcctcggcggcgggggtggggggtagggaggagagcgttttcatccctggcacctaattgccgagagcttccgctggcaggagctgtcaggctgggccgtgggttggattccaagtgccactgtcacctgggagaaagctacacgaatcttaaaaaaaccttacactatgatgtcccgttgcctggttcagagccatccacagggaccaagcaagatggtgccaggcaggggccactgccagaggtgagggccacagagtcctggcttgagagcctccaaggagcccattccgcttgcagtaggagggagagggcgctgggagtcacctggtcgctctggaagtgccgcccaggtagggagcctggggcagccggcaggtgtggtggggacatgtgtggccggcaccagcatcacacccctcatccagagactttgccccgatctcgggttttctgcctggtctgagaggcagcggccctgctgtcattgcctgcccatggctggcaaaggcagaggctgtgaggggacaggatattggacccccacctcctccgcctcgggttccgaggtcaggtgcggtgtgctttggccgtggcaggcggggtccctgggggtgctggggcgtcagccaggcaggcagtgcccacaggcgaagcaggcagccccactgcgcagcgtcacctagcacaggaggggccacagcgcctgctttgcagagaccagtgggggccacgctttcatggagccacatgtgggcccgcctcaggctggggccctgtgggatggtgcccaggggtggcctgggccgtgtgaccccaagcccgtctgctcaccgtcatcgtagctaagggctccctggcaggtcccagctgcccaggacggcctgtgttccctttcctgacacactcatttaatttttaactcaaaggcatttgcttatttattttcattgttcttgataataattctaagccattagaggggaaaattatattcaaaaatgctgtttcacactttatttgtttgatgatttagagcgatagaaaatagcacatttgctggcttttatagtctgataattattcacatccatcaagccattccgggggaataaacaaaacaccaagaaattacactattaatagcatcctctgcggtggacagaaaactctttccggggccagcgtggcggcgagatgacagtggcctgtccgctggctggaggggagcgcctgcctgcagagaacgcctttgctttcattccctggttccggctccagctccggctccggctcatgagctgcccgccatccatcccctcctctgcacggccgggggcttctggggcccatggcaaaggttcgcccacccgtcgccaggagcccctggggaatggcgcgagcagaagaagcaaggctgtcggggcctcgcagcatcccccgggcagctctgccgccagcccagactcaggcctggtctcagctcgctggctgagcctggtggggcatccccaccctctggtctcggtgctgaaacagggacatgcggctcgttgctgcctacgttgggcccagtccttggctgcagtcctgacctcccgtgtgaccagtgtctctggacaccagtcagactcatgtgtgtcaggccgcggggctcagcctcagttgctctctgcttctgggtcccagcccctcgagaggtggcccggcccccactcttgcccagtgggtggctttgaggcttttagctttgcctttcttgggtggcagtaaagtgtaacgttggtgacattcactactcaaaacacctcaaagtgtaaaagagaagctgggaaggtagagggtccgggggctgcccacctgcccgtgcccacccacccactgcccctgtgccggggtgtccttccttctggatctcatgtccttgttggcgcctcacatgtgtctccccatgggcctaggaggtcactgtgctgcctcacatgtgtctccccatgggcctaggagctagtacactgctggaccatcattttgtttgttaaccatcatgtgacctcacgtgtcttgtgtccccaactccagaggggccacgtcctagcatttgtctctcccattgttttattttctcacccacgctgctttggcttgcacatgactgactttccgaaagggtgtccgatgcctgggtttgtttcttgacctcctggtcaccaccacgtatggctctcacggagcttgtggagccttctgcggccagcaccagacaccaagggtggctaccaggtatatggctccagatcccgggctggagatgcggagccgagtttctatgactttgtggtttactgtcttccagaaggacttgtgtacagcattccagaacagagggagtgggtacggggggcagacagccagggctttgagaacacggagatggagaccccgctgggggtgctgtggacagtggtgcagaggagtggcgatgcccgggtcctgggtcctgggtcccgcgtcctgcgtcccggccgatgtgagtcctcagacctcctaatagcattcgccctgatttagaaccagattcctccaggcaaggccaggggcctgcagtgggtgcacctgagggacctgtgcaggccacccctccctcccgaaggctcccctggcagcctcctcaacagtgctgtcttcagcccccgcccagacataccccagggcacctgctccgtgctcggagagcttagcttgctgcaagagtccttgttgcactgagctaagtctccccacccccttaacatttctgactctgccctctgaagccccgtggctgttctgccttgcacagacccacgagattccaggagtcgctcttcctgcttgctttgtcttgacctcttcagcttcttccagcaatccctgtgcgctgggccgcagaccctccgcaccctgcccctggcttagggagagctgatggctgcagagggctggccacacacagccccagtcctggggacgtgctctgaagatggtagaagggagggacacgtacaatgacctggcctccagggctctagagggtgagaggtggtcagcccttgcggggtcccggggaggttgacagagtcagaggacagagagctggtgtgggggcctttgtgtcagcaggaggtggtgctggcatgggggagggaggggagggagggaatgccaggggcttgtgggcagggcccgtgcaggtcatggagccggtagcatctcagagctggacagaggaggtaggctgggagcaggcccggttggggaccagtggcccctgcacaggagccagagggcctgggcagctgtctgtccagaaagcatgcaagaccccgtgccacccgggcacacagggctgtcgtgtctagaaagagatctcctggggtcacgggcaggcaaagctgattgattttggccgtgaagtttgaccttgtgatggaaaccgagctcccagggagtgagacaaactgcctccccgtgtcagtggccaataaacctgacttggttttacagccccgagaaattgctcactaatagccagacagatgctccccctgcctcgagctttagtgaacaaacatttccaaaccaaatagctgcttttgcctttttttttttttttccctccagagccaaggccaaatgtcagggatgccccagcatggccccgagcagggactatgaggagggggccgtgcattcttcgctctttgggggcctgggcggaggaccctgctgagacgcccctctgggaggcccgaaggctccctgagtctcttgtcctgtggtgactgtgggtctctgccgtgcatctgcttcagtccgccagttccatggcccgcccaccagtgccgtcgcaaccccgtcctttggactgggcttttcaggacatccggagagccttggtgtgagaagcaggccccgaggctaccttctggtcccccgtcctggggttggtcccctaagcgaacgcaagcgtgctttcagccctgtgtggacggagcgtggcgcctccagcctcactcagttctgtgtgtcctaagccgtgtcctggcactttctcttggaaactgaggtttttcttccgcctgtgtccttgggggtggccgggaggcaggtctgccagcatcaggtcttctggtccccgaggccgtcgctgggttgttccgagtggcgggaggtgcagctcgctgttgggcactggcggtggcggagcccagaagtctccgtggctgcccggcctcttgtccaagagtcctttgtgatttctgtgggggctgctcctctgaacgctgggcctgcgtcccgcagtctgtgctttctgataacgccagagccacgttccagtgtattaaacttttaacattcgccagattcaattaatcttatctttacaactcccaattacaggcagtaattaagtggagcagcattgtaggctggggatacggcattaatcatcgcagccttggagccataaattagttccttcccgtccccagcatcttcccagaaggagcagagtgtttcattccctgtgcggaggggtctttaatcccacaaaggtgctttggattgggattaaaatttctcatctttatgtaaatcataaaagcccatttaaaaaagaggaatgcacccctgtctagacagtggaagactctctgaggacgacagagttgaaggtgctggggtcgccttggctggggaccctgggagcatgcccagaaattaattatttgtgtcctgttagattagaggctccgtgatgttcgcctcttctctggctcctgccccctccttatttatttttatttttatttttattttttttaattttttgagacagagtcttgctctgttgcccaggctggagtgccgtggcgcaatcttggttcattgcaacctccacttcctggattcaagcaattctcctgcctcagccacctgagtagctgggattacaggcgcctgccaccacgcctggctaatttttgtat[147 bp omitted]agacagagtctcactctctcgcccaggctggagtgcagtggcaccatcttggctcactgcagcctttgcctcccaggttcaaatgattcttttgcgtcagcctcccgagtagctgggattacagcctcctgagtagctggtattttgtatttttggtagaggaggggtttcaccatgttggctaggctggtcttgaactcctgacctcaggtgatctgcccgcctcagcctcccaaagtgctgggatgacaggcatgagccaccgcgcctggcttctttatttcattaaaaaacaaagtggcctttcagctggaaggggctgtagtggagcaggggccgtctcccaccctctgagcttttccttgtcttgcttctgccctgggagggtctcggggagagaccatatcatgtgtcctctcatctgtgtgactgttctagaacgggagctgttggccttgttactctagagttggggtcgaggatgggacttgaccatcctcagctggcactcagctgtgtgccctcaagtccctgaggccctgtcctcgtccccttcgcttggaaattgaggtttttgttttgccggaggccttgggagtgggctgggtggtgtccccgttggcactggggcttctcgctccccctcaaggctgcggctcctggtgcccaccctccctgatgggaagagagtcccaacatcgcaggtctccagcttctggtacggcatgagcgggatgccacccccacttcgcttcgtgtgtttgcacactttcatcttatgtctttcttattcatgatggagccttggtgatctttcaaatgtaaaatgtgtaaaaataaaacttacaaagtcggtgacaaatgcagcttttctcatttccaaagctgctttttccctgttggctcccagtgccgggaaagggtgacgtgggcctggagaccgtgacgtgggcctggagagcgggctggcagctccgggggccccagatgcttgctgttccagactcggccctcccagggtcccctcgccacccgcagttccaatccaatacttttgttttttgccttttcagcctcctcgaggtggagtgccgcttaaccgggagcatccccactcctggctttctgagtgtgtcacaagccaccgagccatggtcctcactccccgctcctccacctgccccacctcgcttccttacggattccgtcctgaaagcccccacccccggccatcccctccacacagtcctgaccatgactccactttgcttctgccctgggcactgtctgcgtctccccaaggctggtcccaccagggacacccccttgcgtggctgccaccgatcttgcctctgacgtgcctcccttctctcgcaggtacgccatcccaccagagcacggcaagcgcctggagcggctggccatcggtaggtgcctgccctgagggccccagggacctgggaccaggtgggaggggcctgtgggtggggaagggcagctggcgtcccccgggctctgctgcggtctgggtttgggttttggggagtggtgacattctttgagccattactgtgtgattttttccatttcctcccaccctcgtggtcagattcacgcccttctgccgcgcagtttgtctcttgtgaaattcgcacagaatgcccagacgctcctgttttccagttttcttagcgcaaacttcttgggcctggtcaaaggctgccagggcccagggagggcagcctgtgttcattttcctcccatcacctgaccccacactgtgcccttgctaattctgagaaagcctaggaaaggagacaattcagccagcagtccgcttacctgcgggggagcagacatggtggccgcacggcgtttgcccttgttctgctgggacccaacctggacacctttggcaaatgtcctcactggtgatgccaccagctcgcgttcatgtgctccctggggactcttgggaaagaaggggtttgtcatagagggtcccagcatgtgcctgagggagtgccagatcctcaggttgtgggatacttggaaacaagtcagacagctggagacacccgggatggggccaccctgagctcccctgaccacccagccctgaggcacttgggcagggtccccatgtcagcgccggcatcacagcacaacaggggtgcaagtttcatgacacctcactgctcctaagtgcctggagagtcatgaaaagacacagctggctaaagcagttcctccctcccgctggtccattcccagctgctcaagagctggctcctccgcattggcaggtggacagcttggggtgcgtgaggggtgagggtcagtgagggcccgttgttcctctgacagcattgagagggccctgtccgagcaccccgcccttcaaggacggcgtcaggcagctcagcaagcgacagccacagcttttccaggagctctcacccagcctcagtacaggctcccgggactgcctggttgctgtcctctgtcccttccaaaccttcgagccaaaggacgcccgccacatgctctcttcccccttcccatgggcttttggctttggagatgggaactgtcagtctttctagggaaataagggtctcctgtcccagagactgcgccaggagtcacgtggctgtgcaggaaatgttgcccaagcgcggcagattcggtggtggggacggaggggaagggagtccttggggagtgggctgggccctctcctggcatgtgctctcctggcttctggactgagggctttgctcttggtatttttgagcgtttctattggaaacctggacccctttcttaggcacaggtgaatcctggtcttaggagcacgcttctggtagtagaaattctgcagtcacagacaggccgtagcaaaggtccagctcacttacatactaaagctgtgaaagaaaagctagattaaagcatttctcccattgtatgtttttaataccaatttccaaaacaaatttgaagacataagctaaagaaacattccccatgttgtattagcatcctgaggctcctgtaacaaatgaccacagaattaatggctgaaaacaacacacgtttattctctcaccgttctggaggtcaggagtctaaaatgcatgttaaggggctaaaacccaggtgcaggcagggccagttccatctggaggcaccaggggagaacccacttcccgccttttccagtgtctagaggccgcccgcattccttggctcggtcccaggggagaacccgtttctgccttcccttctccagcatctagaggccacctgcatcccttgacttgggccgcatcactccagcctctgtctctggtctcctcactttcctctgctgtaaccaacagtccctctgcctcgctgttctgaggacccatggaatgacatcggatcacccggatagccagggtgctcccccacctcaagatccttaactcgatcccatctgcaaagtccctttcagcatggaaggtaccacactcacaggtcccaggggttagcatgtgggtgccttggagttccatttttcagccagccacacttagaaagccactgaagaaaacctcactgagcggtcagggagcacctgtgggctccttgtctgctgcaggcatgacaccccacacctctgtcgtccacacggcagtacctctctactgccacagggcaggggatgcaggcgcagcctggggagagccagcagccccggtggggagcaggctctaggctccgcagtctgtactggagctgggcttcacccaggcgggcccctcctggtgctctctggtgcccagatcgagagggccaccccatccttgccagccacttctccccctccatatttaactgagactacagttagccactgtcccctcccttctcacccagtgtgacttttgcattagaaaagcagaggttgacaggagcctgctggagaggccacaggcaggatctggtgaggccacccctgtccccaagcactgccacatcccctctccctggaatgtgaccagttctaccctgaggccaggccaggcacctggagggctggtttggtttctaagtgtgcagagggctcagtgcctgggctgggtgagggggagccagggaagaattagttcttggtggtgctttcacaggggttcttagaaagtatggactctggccaggtgcagtagctcacacctggaatcccagtgctttgagaggctgacgtcagaggattgcttgagcccaggagttcaagaccagcctcaggaacatagtgagactctgtctctgtaaaaattagctgggcgtggtgttgtacatctgtagtctcagctactcaggaggctgaggcgggaggatagcgtgagcctgggaagtcaaggctgcagtgagctgtgatggagccactgcacttcagcctgggtgacagagtgagaccctagtcacccttcagcagggcagagcagcttctaaaattctgggagccagcctggctgtgaaccccgaggagggtcaggaaggttgtgggatgtgtcagatgcctgcagctgcgtggaaacaccttgagtcccctgtggcctctggctcagggccctgccctcccctctggaaggcagctgggggcaggatggggcactaatggggaaagcctacccgaccccccttgtgttcctaggtgcccctcccagactctttttggggcaggcgatgtgttccatcgttgggacggtggaaggggtgtgcgagtaatatggaaaatgaatagctgtgctccaaatgggctcaccgggagagttgtggagcctatggagagagcattaatgtgctggcgccttattggtgctaatcacttaaaatgtgcgcctttgttagagctttaatgagagccacttaaactgtgcattaaaaagaggaactgcggagaggccgccggcaggccgggcggcaggcagtcatcattctcgttgaaatgcttttagtgtggagaaaagttgctggattcggcaaacccctgtactttgcaaaacctcaccgtggtgtctgcgtggctgggtgtcagcagaagcaccgtggccccgctctcccgcctccccgtgcgcctgggcctccgtgtgctggtgctctcgcacacagctgtgccgccttccaccaatgacccaatgggtgtgtgtcccgtcctggaggcgcttgaggtctgtgcaggcttctagaagggccctcgggctggccgaggctgttggtcagtcctggcaggaggtggacgcctgtgggcttcctgtctgctgcaggcgtgacaccccacacctctgtcgtccacatggcagtacctctctaccgtcacagggcaggggacgcaggcgcagccgggagagagccggcagccctgttggggagcaggtcctagtctccgcagtctgtgctggagccgggcttcacccgggagtgcccctcctggtccacatctgacccccgtcctcctgcctcctgggccggcctcctgcccgttgccacttgcagagtgggtggtggagcaggaagtgcccgagatgaggcggtaagtcccctccctgaactgctcttcctggcttgggcccgtctggctcccctggtgttggttccgggggcccggctgcttcagggaagtccctttggcacagggattgtgttgcacactgaggggcgtgggcctcagcagctgctgccgggaagccggggcatccttaccttacccgccaaatgcacgggtcttcaccttgtgatttggaaacattcctgaactgtgctaattaggaagcttggtttattttttatttttatttttatttttgtagagatggggtcttgtgatgttggccaggctggtctccaactcttggcctcaagagatccatctacctgcctcggcctcccaaagtgctgagattccctgtgtgagccaccgcgcccagcctggctgtgaggtttgtgaaggcgccaagctgctggtgtgagtgcctgtttcccaggcgctgctttaagtcagctgcagagcgcactcctagacagacagccccacacacatgtacgcagcccaccatgctgagcacggcccaacaggaagaggttgtgagctctgaccacagctcggggtcaggcccactctgccacttcctggtggtgctggggccgagggtgagtcagttggtggcccgggcctcgatttcctcacctgtgcagtgacagtgaggacacccgctgtgctgtgtgggggggcaggtgcacagtctcattcatggccttgaaagcaggtgcccaagggggaggcagcactgctaactcctcaccgtccctggctggtctggttctagaacatcagctccgagaggagagcggccacactgcgtcctttccccagggtcgtgctctctcgttgactgagtgacgagagcggccacactgcgtcctttccccagggtcgtgctctctcgttgaccgagtgacgagagcggccacactgcatcctttccccagggtcgtgctctctcgttgaccgagtgacgagagcggccacactgcgtcctttccccagggtcgtgctctctcgttgaccgagtgacgagagcggccacactgcatcctttccccagggtcgtgctctctcgttgactgagtgacgagagcggccacactgcatcctttccccagggtcgtgctctctcgttgactgagtgacgagagcggccacactgcatcctttccccagggtcgtgctctctcgttgactgagtgacgagagcggccacactgcgtcctttccccagggtcgtgctctctcgttgactgagtgacgagagcggccacactgcatcctttccccagggtcgtgctctctcgttgaccgagtgatgagagcggccacactgcgtcctttccccagggttgtgctctctcgttgaccgagtgacgagagcggccacactgcatcctttccccagggtcgtgctctctcgttgaatgagtgatgagagcggccacactgcgtcctttccccagggttgtgctctctcgttgaccgagtgacgagggcggccaccctgtgtcctttccccagggtcgtgttgtctcgttgaccgagtgacgagagcggccacgctgcgtcctttccccagggtcatgttgtctcgttgaccgagtgacgagagcggccacaccgtgtcctctccccaggatcgtgctctctcattgaccgagcgactgtgtgggctgtggtctggtggattttgtctggggaggtcggaggagaagtctctgcatagccgtgccctgtgagggacccaagtgtatgccatgggtgggcaccttgtcacacaagtaaccctggtccttcccctggtgaggaggcccttggctgcccctgctgctgggcagagacgagaccaggcatctgctcacatggtcactgcgcagaggccagagggtgtcaccactgtctgccacctgcagagctcacagcagggcactatggggcggctcctgcgcatctccttccccccgacctgcaggcactggggccctgagaaccaagggcagatctgggccgtgctctgtgctcccacacgcccgctctccatgggaggaaagagccagcctgcccagagggcagcatcctcgctgaccccggccggctgtggcccaggagactgacgtctgtcttttcggccctaggcttcttccccgggagctcgcagggctgcgacgccttcctgcggcataagatgaccctcatctcgcccatcatcctgaagaagtacgggatccccttcagccgggtgcgtacgggtggggcctgcacgcctgtgggtgaagtgggtaccgggtccaagcccaggtggccgcacataccccaggagataagctgtttaaccctggagaagtttctagaacagtgattagcatgccagaggagggccgcatggctcagcagttagcctccagctcttccacggggaagcgaagatggcagagcttgaatctggcggggtgttaacctcccctcccaaaccaaaccaaaacttcctcctgggtgtggccatcagaggcccctccgcaggggctgcaggggtggaagggcaggggcaggccctgctgacctggcaggaagctgccaaagaaacagagggcagggcccctcgtcccgtgcaaggtgggaacctggttcctaccgccccaggccacaccctaagtctcaggcacccccacggcccatgtcacccggccgtggagagaactgcctgtttagaagtgacatttcgggctctcctgcaccgtgaagactgtgaactcattcagttcactgcttcaggggctgctggtggaggctgtgatggaggagacctgaggccggggggtggggcctccctacacctgatttgatggacagctggggtttggtgtcccaggagcagagcaggctgtgctcagggtccagctcagcaactgcacccactcgaggcagttccttccccatggagaagcctttgtccatgggagagtctaggcctgtgtccccagctctgtccaggtgagaggcacgtgccaagaacctgcaaggcaggtctgggccgcagcccagctcatgaggttccacgggaagagtgatgtgcaggctcgggagcgtgctctgtggtgaggccctgagtgtcagccagccggaaattgcttgtgacatttcaatcaaaccgccaaagcatcagctcacacatcggggatccgctcttcctggcggggctgcaacccagaggccgcctcccagccgctgcaggcattcatcagacagcacagatctcgctcggagaagtgcgcatttccggcctttcctcttctcccccgtcttctggttggaacatcattcagtaccagcaaaaccagacagatcacggcattgctcagggaagtgagaagtactgattttctggctggtttgtctaaaaccttctccaaagtggtgcttcctggaggggggtgcccatcgaaggggtgggcaggcagtgagtggcctggactcccaggtcagcatctgtatcgcactgcagtttatctgtaaagttcctgaacctgagccaaaggtggctcaccaccagcctcagagcggctgctggcaccatgcatggtagcaggcggggtccaggcagtacggctgcgctccccaacaccgccagctggttgctggggccgggcgccagtttctccagaggctgccacagtgaaggcccctgtcccactgcagcgaacagcaccctgtgccgcccggcctggggaccgtccttcagcctctcagacgccatgggcttgagatgaacgtcccttccagacagcagcgtgggtcccctcatctgaattcctggcagccttcaaacaagtgactccccacactccccttataaatctttgtaatggtatttacttctaggagaaaaagccgatcaatagcagagctttttaataattaaaagtgtgtacttctgtaatctgccattgactccctcatttattctgcaagagctcgcagaggaaaccgagttccgggctttctccgtgcctggtgtctggggccgcgtcctgtcaccactgatgactttgccgcaaagcctattcatcatcccaacgccttctaattgattgttggataatgttgacagcagtgacacaggggacagacaccgtgagtgtggaacgaagccaccaggatgcaggttttctcgcaggaacataatcttcttgtcctaaccgagcacattttctcttctaggccttggttcataggagggctgggggagtgaggtccttacactgtgagagcttggctctctgctgccatcacccccattcaatcttggcattccgggggcccagctggatccctgaaggctctgagtctgatgtctgcctgacgcatgcctgcaggcctggttctccaggggagagacagggagccgtcacttggccttagagcaggtggtcagggaaaagcctttccgaagccggctcaaataggataaaggaatcagtaatggcatttactttactttcttaacttttctttttttctagagatggggtctcactctgttgtccaggctggtctcaagctcctgggcataagtgtttctcttgtcttggcctcccaaaatgctgggattacaggtgtgagcaccatgcccggcccagtaattaggtttttttttaaaaagccccaaaccttaattttatttgcccctcatttcacggagctcccagcgtagtggggagaagctggcccagagaaccccacgtcctgcacagtgagggccagcccttggggaccccatgtcctgcacggcgggggccaggccctggggccacgtgtgttccccccccacccctattttctgccgcgtgctcgttctgctgcacgtggctgtcacttgaatgggaatttaaaaatataacttaatgcacactgacttcccttgattggtgcaattaattatttgaaaagaaaaatatcacagtgttcttaaggactggcatttttccaagctgtgtcagttttgattgatgtctgacgccgtggctggcttctgaaagcctcaccagttctgatggcttattggcgacttcagtgtatccagcaatctctgctcatctttctgggggaatatataatgatcagcaggcctgagaactcctacaaatcagagataagaaaacaaatggcccgatgaattcggcgtgaggggcttgagcagacgcgttacgaaggagctgcaggaacgaaagccatggttcagtgcccagcatcggtagaagtcagaggcagccagctgggagacaccgccagccccaggacggccacgtcagaacaccgccaccagatgccagtgaggagggcgcagctgcacgctgctcccagccggggtggatgcagggcggtgccatggccatggaaaaccgttcggcattttcttggaaacggaagcatgtaccctgtgccccagcgatgccactctgtgcatatttactcaggagaaatgaaaacatatgtctccagaaagattggtacataagtgttcttagcagttttcttcacgagagccccaaactggaaacagcccgcacgtccatcaacaggaggatagataaataaataaccatagatccacgcgcaaccgagtactgtttagaaatgaaaaggagcggtcgcctggtgcacaggacagtgggaacaaatctcagaaacgcacgccaggtggaagacaacaggcacgtgtccctgccgtacaacgccattcatgtgaaccactaggagggaacgaggtctgtggtgactgagagcgcgtgcgtggttcggtggggatggcctggtagagggctggtaggaggggtgcctgggggcccggcatgttttgttcctgtctggatcagtggttacgcccagaactccgagcagcctgtgatccctgcgttttactggatgttaaataaagatgaggagcccacttgacttcaaggattctagttcatgagcctcagtttccacgtctgtggattgggcccacagccccacctcctagaagcccttggcctgagccccggggtgcagcaggtgggagccatcactccaaatttgttgttgatctttctggatggtcgtctttcaaaggctttatcaacgggcttagcagtgagcagggagtgggggtcagtgtggccatctcgagtgtccccagagtggggagggttcctagggcacaaggctgtagccccccagccctggtaggcagccctgccttttcttccagaccttggggtggctgttgggaaaccttgggtctggggtcattgtgggccccaccccagccacgcacgcctcggctcctcagtttagggggtcctgcttcagagacctgcaaagtcgaatgggccgaacatccgaattggacctgggtctggaagcattggcccgctctccagggtgctgatctgtggtgtcaggtcatgcccccggtgtgcagatatttctggatctccatgacttcatggagatccccttgttgagatacaattgaaagatggcttgggatggcggcgtgtcgcaggccccttcctggcgtgttttgcgcgtgcagtggtggttcctttctcatgcgagggcagaaggtgtcctgagcgcgtgcagtgtcttgtcttcagagcactctaaagctgctgtcagcaccacccgccccgaaaccagccccagctgcttcaggacatgtcacagtgactgtgagtgtgactcagccacctccaaagcaggaggcccccatcgctccccatgaaggtccggctggagacacccccacgggcattgtgtccagccacggctccatctgcggttctcccactggggtgatgctgacggccgccttggggcagggcaggggctgctggggctggaggggcccggctgagccgagtggaggttgcagagctgtggctgcggctgctcactatgtccttcatgagccgcgtgggaaatgggctggagccctggagcccctggagccgctggatcacctttgactttgtgaaacccccttggctcataagccaggctccctggcacttgctgggaagtgcccacgtcccatcccctggtgcgcctctggtggccctgccctcacctgtctcctttccctctgcagatcacgcaggaggccggggaattcatgatcacatttccctacggctaccacgccggcttcaatcacgggttcaactgcgcagaatctaccaacttcgccaccctgcggtggattgactacggcaaagtggccactcaggtaaaagcttgcctgctgggaacgggtcccagcagggcgggaggaggctcttttttgcctctgcagccacacgcccatagctggtccagcagccgtttcgctcagcccagggcctgggctctcaaccagggtctgattctgggctcctcagagagcttttgcccagaacgctccttacctcgaagactggagaggaggtgggcaggtcgggtggacgatggtggcccagggcccatctccagcgagttccatacaccagttatccctcggcctgcgtgggcctcctgggcatggccggctgctcgggtctaggggttggggtgtttcctccaccagcaccattgtcccccctgctggctggctcctgggcatctcctggccatcatggtcctggggttgggttgtttgctgacatctctctcctgggggccgcttggccaggcaggagcccactcaggcatctgcccccctccctccctgctcccctgtcagtggcagtcccccagctcccagtgcctgggtgcttcctgctggtggggtccctggaggtcacggtgagcttagcatgcccgtgggaagactcacagtgagtggcccttgcttgatttttttctggtgattctcgttcctggtctcagaaggccgattattggccagcaattggcgtctgaactgagcgcttgttccccactctcctaacgccacgtacagccatctgtgtggctgttctcgaccatgcggagggtgtgggaggctactggatggataggaagcccacaagagctgctgctgggcacgggtgggacggggtcgccttggctggccaccccctcccccatggtctctgccttggggtcccagtgacggggacgtggacggggcttatgaatcctaagcctcagaaaggggagtgtgggacccgggaagggaagcagctaggaggccgtctgggcatcacaggtctagccctttcctggctgcctgtctggagctgggggctggggagcctcctcccagggctgtccctgaagtcccctgcgtgcttttcctggctgcccccaagtaggactgagctgtcccggcaggccaggctcggccacgtggccctggctcagggctgctgtttctgggcagcattgaacagcccagctcctcccagcccctctgtcttccccgcagagacagcctcagcctcagcccctcccggcgtctccctctggtttggggtcatgtggctgctcgtgatgcagcaggacgggcagcgggctggccagggtgagagcaggtacttcctcccatcgtccctcccagtgcagagccttccagttcctccagagccggggtcagcacaaatggcagattcttctcagatccagatgtgggggaggtgtgataggagagaccacagggccagatccggattctttgactctcgcagcattttctagatgtcagaccttggcctggtgcggtggcttatgcctgtaatcctagcactttgggaggcagaggtgggcggatcatttgaggtcaggagtttgagaccagcctggccaacatggtgaaaccctgtctctactaaaaacacaaaaattatccaggcatggtggtgggcacctataatcccagctacttgggagactgaggcaggagaatcacttgaacccgggaggtggaggttgcagtgagctgagattgtgccctggtactccagcctgggcaacaagagcgaaactgtctcaaaaaaaaatacgtatttatatattatatatgtaatttatatgttatatataatttatatattatgtataatttatatattgtatataatttatatattgtatgtaatttatatattgtatataatttatatattgtatatttatataaaataaattatataaattacataatttatatatataaatataaattatatatgttataataatttatatattatatataaatataaattatatatgttataatttatatattatatataaatataaattatatatgttatttatatattatatataatatataaattatataaattatatgtattatatataaatataaattatataaattatatatataacataatttatatatataaattatatatgtatgtataattaagatggattttggccggacatgatggcttcacgcctataatctcagccctttgggaggctgaggcgggaggatctcttgagcccaggaggtcaaggcatccctgagctatgattgcaccactgcactcgagcctgggcaacagagtgaggacccgtctcaaagaaaaaaaatgaatttcacctgtttcattttacccaccctcccccgcccgccgccccggcccacccttttatagagacagggtcttaatatgttggccaggctggtctggaactcctgggctcaagtgatccacccacctcggcctcgaaaagtgctgggattacaggcgcgagccaccacagcacaccacctctttttgcttttttctcctggctactgggaaaatggaggcagcataggtggcctgtgtgacatctctcctggccacgccggtctggacgaatgagctaacctttatttttctggctgtttctctgccttcaatccagtttagaaaaagaacaggggtctacagcagggaaggcttgagagatgcccccaggactcagttcagaaagtctcgaatgtctctagtgaagactctgggcttagctaaaggaagagagatccagaagttgggatttcagctttttgatctaaaggagtagttaagtatctcagggctgttgctgtgttgaaagggcatgtgtctgtgtgtttgtgctgccgtgaggacaccacgggtgttgtgaccagcccagcagcagattgagctgtaagccccaggcctcgggcttgtcctggaggtgctgtcggagctgaaactgcagcggggcggtggggactgcccagatattaaaagcaatttggggttcagccatgtgttcacaaacaagttggcatttgggaagtgcagacttagattgggctccacgcttccattgtcaggcggcgtagcaagtggcgtgcagcgctcgaaacacaccaggggttccaggcaggcgcccagggcctgggcttcctcctggaccccccagccccgctgtcccagcccctgctcaggcacccctggtgtagtcaggcctggcctgggcggcgagggccttacgcagggagtgtcattagccacaaggcctctgtggccgtcgggggggtcggtggctctcaggcttcttggcggggcagccggcccctgactctggcagggttttctctcccataagcagcccaggctggagagtctgttagagcatctcgccgcacagatgacagaggagtgttagaaggcagggaaacggcccaggtcaggtggggctcgggccttgttcagatcttgtgtgcagccagattggagagaaggggcagcccagaaccccccttttctggtgtccctctggccggcccagctcccctgtcccatttgcgtttcgggccactttgttttgagcacattcttcagaagagagccaaagaggaggctttccaccccctcgatttgcttagagacatttttgcttgttggctgttcaccttccttgaccgctagggacccctgcccccccccaccccgttgtcccctttctgtcatttttgtgctcaggagctgacaggtgaaaagccaccctcctgccctggccgggccctgtgaattttgggtgtctgtgttcacgggttggcaagctagggctcggatctggtaggccgacgctgtgccgtctgcaaactgagcagggggtttacgtcttcacagggttgtgggaggagggcaattaaaaggatgtgtgacctgtgacagccggacgaaactgaaatctcacccacaaatgagcagcctgtgcacagagccacactctggcatggaggtggcgtctgcgtctgcttcgccccgcggagttgagtagttccgaaaagccaagaggcgtgtgctgcctggcccttgcaggggaagcctgtctccccgtctacagatgccagcggggttgcacagctcgcaggacagccacctcctcccccccccagcccccagggcctctgtgggcagaggggctgctccgaaagcaggttggcccccaccgcctcaccacacctcgagccagtgcagctccctctggagttccggatgggcctgcagcagctacagccgtgagcaggccagaccactgccacagatgtgctgccacctgcctgcggagcatccctggctgccccatggcaggcaggaggcccagccctcagcccaggtctgcccccacagggcagagctctccaaggttcccccggctgtaaaatcccagagaaatacgatctccctgcagcaggtggcttacctacttacacagccttggaccagagcctccgggtggagcttccagggccctgcgcgcacacacaggaggcagcctggggctctcccctcccgtcttctgcagagcagggctggcgcctgcctgagctcacaggtgggatggagcagcccaggccggcacttgtggcctaaacacggcctcattcactccccatcagcagaatgccgtgggcacacggaggccattgtcaaggagggggtgggatttattcccgtgggtgtctttcctttctagctggtctgtgggcattcacccttgccacctgtctgtgcagccagtgacatagtcattgcccctcggggcaggaggaggcctggtggccctgtgtgtctgtgtgggggaggtacggctgtgtccccacccccggctctccactcctgctcatcccctatgaaacctggtgtcatggacctgctcccctcggggctggtgacctttggaccccagtggtgacaaccacagaggtccccagacatcacctgcagcgtcccttggaggcaggattggccccagtgagagctgctgcccagggccacttccgaggtcagtcatctctttctggggggtggggtaggtagtgccagtgtcatttttgactcccctgctggtgtggccttctaggcccaggtttcccagcatctcccctctcctgctgagggcccccatctctgagtattccatttgagctgctcatctctgtgccactttttcccaacttaaggcggctgagctctgcagcggtctgcagcctcggtgtgcgacgtttcttaagcacacaggtgttaagtatctcagagccatgaaactctctgccttgcctgacagactcccaccttgaggatggaccctggctttggggctgggatttcattcactgcactcgagtctctggacgggggctgggctgttcggagggtttggggagtgagggcaccgggcagcacaggtttaagtctcctgtgtaggaatctcacgtctttcgggagctaaatgccaggcaggaggttgctttcccctcagaaactagaagttcttatccaacctgctcttcacgcccacctgtggggagagaagcccattccttgtgttcactgcctgccggagagcaggagggagcctgtttcctcgtgggcgggatgtgccccccgactcgggtaggcccgagcatctgagggcccccaagggcccatcgttttcagggtgaccgtccacacctgcaggggcagggagtcggcggcttagcttcctctggagcacggttccatcagccagatgcgctcacatccagctcttagcggctcctgcaaaaactcgctctgatcaaagggaggtgagtgtaaaaatgcggcccgggctttgtctccaactccccccgtgattcctggaccacgcaggccatatcactcggacaccacggatacaaaccctcactcccctggcccctagagctgagcagagcgctgggttcgacttccatctagagcagaggtcgatgggggggaggttgcccctgcccacagctccacccgtgataagtaggcaggcttttccataattaatcaaaacctaggccgttcatctgtgggccagggctgagcagagaccaccggagtccctgagggggcccctgaggctgcaggggacaggccaggccccccccctccccccccccgcaaaagagcaggttgtggttataggggcaggatgacagtgggagattttgacatcctcaagaggcagaggagcaggacgcccctgccagcttcatccgcacatcccttggggcagatacagaaggaagaatgtgcattgttggaaactggggaatacggtaaacaaagagaagtgggagctgaccttaccatctctgccatccgctcagccatgagaaggagcaaggcccagcgtgggtgaaccctgaggacaccccgctcagtgagagaagccagacccagaggctacaccgtgcgagaccccatttctatgaaatgtccgggacaagccagtgctcagaggcaggaagggatgcttgggtgtgggggctggagggtgacaacggatggggacgggttttctttggaggatgaaaatgctctacctttgatggcgaagatggtctccccactctgtgaatacacaagctcctgcgtcgcacacctggtgaattgtagggcacacgaatctcactgaaactgtccagaaacatccttcccccagatcagctctcagcaaatcaggaacagtaatccagaataaaaactgggcagcctttctggaaggccgtctgccatgggttacacatgtgtctcctgtggcctagcggttctgtctctggaacacgtgcataccggttccatgtctagggatatctgtagccccgtttgttgtagtggaaagttctatgaccaggggatgggttgaaccagtggaatgttatgcagctgtgaaaatgggtttgctccatgaggtttgctctgtatctttgggcatggagagatgagcgcgacaactttaagggaaaaaataggctgtggactgggactcttgtgattcccgttttttgtggggatgtggttcttgaactgggaaagggagatttgcccaagtattggttgatattagtttgatgtcatggaatttgggataccttaaaaatatgcactaacttctcaatatggttctgtctttttttgtactaaaaaaaaaaaaacccacatactcctctttccatagtcagaggggtgtagctctggggagggaagagtggggtccgccattcctaggtgcttcttgagcaagcaccccacagttcccaagtggaaaaggtttttgttgttgttgcttcgttggtttgttttcagaatgggagttaaaaaccaaacaaaaggccaagcgcagtgactcatgcctctaatcccagcatttagggaggccgaggtagggttgcatgattccagaggttcaagaccggcctgggcaacatagtgagaccccattctccacaaaaagggggaaacaagacaaaaacacaaaaactgtgaagacccccaaagcctggcccccttcctccctgctgagcaggtgaggcagtgctggaaagaggacagagtggaaggtcctggaagcccagcccagcattgctgagcgcctgccgtgtgcaggggaggggtcctagcccctgggtctgccagggagaggtgagagtgcagaggacagcaggcttgcctccctagccacacacctcgctgcatgccctggcctcgccaggctgaggcttagggtgcagtacccggttcgttttgagaagtctctttctcagctagagctgtctcagtggtaacgttctctctctctctctcctcatctctctctccccccatatctctccccctctctctctctctccccctctccccctctgtctctctctcccccatctctcttccccctctctctccgcctctttctctccccccctctctttctctccccctctcgccccctctctctccctctccccctctttccccgctccccctctctctctccccttctctttcccccttgctctctccccctctcccccctccctctctttctctctctctctctgtctccccgctgcgcgcgtgcgcccccctccggcccccccttccccccaccgccgacagtaccaccctccatcaagtgccgactctgggccttgtcaccttgggaggaccagagtagtgcagtgactttgccaaggtcacacagcaggaggctgggcccagcacaccctagaccttcctctgcttcccttgccccacttggaggcacaggccgatggggcatctgggagcccacaccctccctgcccaccaggtgtctcctgggccagtggcttcgtgtcctgggcacgtgtcctgtgcacagcccggtgggggcagctggaggggtctccaaggcggcggcttcctgtctcagagcaggatcccccggcatgtgctccagcaggcaggctttgtagtgggattactaatggggcagatcaaaaggatgttcctatttcactcaaggaaataaaatgtgcacgcagccgcctttctcacgctgaactcaagttagtcctacaagcctgcacgccatgttagattagctcagcacgcggccgggctggccccgaggtgggtggtgcctggtgctggtagataagggtctctcctccagagcccaggactcagcggcatcccgaaacaccctgccacggggagagttgactgaggattaaacagagcgcgagagatgtgaagcctggctggaaggctggggagccactcacgctctcttaactggttccctgccagctgtctgtgggtgaggcctgctgtgtgccagcctccccggggacatctcgggctctctggaggtgtctggcagggagagcttctgctgagcttgggaaggggacgatgacttggattccccagaggcgccattccaggaaacggcccactcggcaccacccatctcctcccacctccccgcatccaggctggatgggggctccggcaggaaccaggcctctcctaaaaccccagccctggggtgtactgaacttaattactgtaaaattcaaaccaaattgtttctgctgcctgggagaactgtgtgttccttctgtttggtaatgaggctgcctgctccaggtgattaacccggagcccagggggagggagcccagggggaggcggcagaaggcaggggctggggaagggtgggagggaggagggcccacggaggtgcgggaaactccagccactcctctgacccgctggagcccacggctggcctgtgccctgcctttggcttcctgcctcagtgagcctctgatttatggcgttgtggggctggacgcatcgtgtgtgccgcaaactgctgtgtgaaatatgtctcccttgctcttcccagatcttccctgtcactctgaccctggtgaggcctttggggccccttcccatgtgtgggcttagggggtgtcacagtcacgcagaagcgtggggagaatctgcagctaagaccaggcggagcggatcccgggccgggccagaatgagtgggtcccatgctggctcttggcctagtgtttatgctgcatgtctggagggtgatctaggagaggagtggtctggaaagaaggcctcgtttagtctctccctcggcactgcggacattggggccgtatccttctctgggctggggccgtcctgggcactgcacggtgctgagcagtgcccctggcctccacccactccatgccaggcacaccccaacccagctgtttcaaccacaacatcggcaggcacatccactcccatgggggcagggccacccattgaagacacctgggtctccaggctccctgcgggcccttccttcctttctcccactgctctcggctttcgggatcacgccctctaatacccccggttctgctgcccaggagctccgggggggacacatctccccagaggagggtcgggggcttttctagaccgaggctcgtggtgtggctcgagggcctttgccagctcggcagcccccagtcttctctaccatccttcatggacagagctggttcgggggctgcagctggttgctgcctggcatcagaggagcgggtctgcttacggggtcaggcagaggcaggaccccctcgaggggcactggcgagggagcccaggggtcagccgtcagagaagcaggagagtcagaggagggggctcgcagggcctggccctgagtcagaaatggtggagttctcccctctgccatctcagggcatcccggctcatggctgttcctcagccgtcgtggatgagtcgtaacctggagagtgagagagaacctccaggggcaactgctggcaaggagggatcaggggaggccgggcccctgtacccctgaccacatgtcctctccccacccaaggtgtgacccttcatggggcctgtggttcatacctggagctgtctgcctgggtgcagaccctcccctcctagtgctctgcctcagtttccctcctagggctgttggaagtgacatggaacagcacttgggtggtgcctggcacagaagcaggactgctgtggctgttgaggccccttcagggcagcatgtggaggagaaaggcaggtcctggtggcctggggtcaggtgtgcagctgcctgcttgtcatgtccctgcaggggctcacaacactgatagactcgaggctactttcatttagggagggccaaaggggacatcggagcctccccaggcacctggtggatgtgtgggcagcatggaaggctgcggaaggccatggaaggcccgtgaccttgcctggcctggctggccgggaggggcagggagccgctttctgtgctgccaggaatggccccgcagccgaagcccagggagccctgggagccggcgcctaattgttttgttgacgcggctgccgagcacttccagtaggtttcctaatgaactggtttgttatcggcctcactgcagcgctgataattacatcagaaacagggggcccactcgtccttcccacgcgttctgtgagccatcagcgcagatgcgggcgcctctgccccttcctcggtgtttaacgctttgtgtgccaaggcacctgccacccacacccaccccagacagatggtcgagatggctgtgagaggagtgtgaccgccactcgccccggttggtgtctgcttggcagtggtcaccgcgcaggtcactgttcagctgctgggaaggcagtggatgaggccatcgaggtccagggaggagacaggacacgaacaagggtggaaggaggaatttctgctcctagagagggtgcagggacgctgcagctgcggcctggtgtgtctgccacctgggtagcccagtccacagcccaggcagctgaaagcaccagacatgtatcctctctcagttctggaggcagaggctgagatgggtgtgtggcgggccgagccccctcagggcgccagggagaccaccctgcctctcctggcttcagggctggccgagatctcagggctgcttggcttgcaggggtgtcgccctctcctctgccccatggtcacgcggcccctcctccctgtctttgtgtcctcttgtctgcttctaagggcaccaggtgctgacccccggcaggccctgatcccatatgtgaatcatgcactgatgacagctgctaccaccctgcttcagaaaagctcctctgtgaggccccgggtgcaggatgctgagtagcgcggggaacagcactgctggggaggaacgaaaattgcgaggtccctgagcgggggacctggcagaggccaaacgtcagaggtcgggggctgcagtaagggcctttgaagttagatttcatcaccatgtgcgggggggaggcactgggcatttcagcaagggagaggggccactggctggagaagggactatgggagagatggggcagggagcccggcgtggatggccgccgtctagacgggcatggggtctgtgggcgtgggaagaaggggacagcgtgtgcctgtgttttaggggtggtgcctgtaggacctggtgataggacagaggtgggggcacaggggaggggtggggacttgggcatgtaggtgtgcggtggtgctgggagcgcacagagggacatggaggagccaggactgggtgtgctgttgagatgcgtcagagcctgccttccagtgtgggagccacgggccacacgtagcaccgtatccattaaccaaaatgaaataggatgaaccctccactcctcagtcaggccagccgcgggtcaagccctttgctaatagccgggtgggctggtggccgtgtcctgggcagcgcaggtgcaggtcatcgccgtcaccacagacagtcctgtcaccgtgcagctgatgcgtcctgtggaggggtctgcagctcgggggcggcgccgggggcggggcaggggcagtgtgagggatgggacgtgttgagccatagatgtcctgtcggcagctatgagatgctgtgccctccccacgccaggatcgctgtttctaaggcccctgcccgtccccatccctgtccacagcagggcaagcaccagccatgcaatgtctgtcaccgtcggctgtagaaccgcccgctggtggctggcattgtcctcaatgttccgccctggttcctggatcagggggctgggagttggcgctgcagctgacgagagcattcatgatccccgtggtcagatgctatttgggttgatgattttatcggaccacatataatcattttctcattaggccggtggctgtgtcttctctctgccactctactgttttacatgagcagactctagtatctgttcaggcttttaaaaaagagatggcctctggtgaaagctcagtgctgtttaaatcaggaaaggtggcagatgagccccctgggctccaaggcagcagtggtagcccactgtgtctgcaggtggccagggtcctgtgatgatgctgccagccaggctgctgcacactgagagctgggggcccacgagcctcggtgctggacgcccccacagtgtggatcagatcgcaaggggctggccagggcagggcagagcctgctaggaggagggagagggctgggagcagccagggtggacccctcaacctggatcagatcacaaggggctggccagggcagggcagagcctgctaggaggagggagagggcccggagcagccaggtcggactcctcaacctggggaccctcccccagcagctgcaggcttgagtgtgtgcagcacttatgtgcgagcatgtcgtttgtgtgtgtgtttccctgggaatcagaccctggcaggggcccccagtctatagagtgggtgctatggaccccagccgctgtgaggcagagtgtgcgccccaccaaggggcaggctgccgaaaagtcagcttcacagggagcttgttttaggaggaggtccttgtgttatggaaatgtaggccacagactgaggcgcacacagggccggtgtacagtgtggggaatctttttttttttttttttgaggtggagttttgcactgtcacccaggctggagtgcagtggtgtgatctcggctcactgcaacctctgcctcccgggctcaagcgagtctcctgcctcagcctccctgagtagctgggactacaggtgcgccaccacacctggctaatttttgtatttttagtagaggtggggtttctccatgttggccaggctggtctggaactcctgacctcaagtgatccacccgccttggcctcccagagtactgggattacaagcgtgagccaccgcgcctggccatggcgtggggaatattcacaaccctaccccatccggactcctggcagcatggagtggtgtcaccttggatggggagcacggtcccaggtctccacgggcttgggcaacccctggggttcctgctgacctcagtgcccctgcccagaccccagtttctcacttccgtgcgatgtggcatttctacactggagtcgctggtgacatcagtggcgcctgttgccgcggtgcccccggcggtgtcggtggtgcgtgttgccatggcgcctgcctggtggaggaagtgtcccgcggtgcccccggcggtgtcggtggcgcgtgttgccatggcgcctgcctggtggaggaagtgtcccgcggtgcccccggcggtgtcggtggcgcgtgttgccgtggcgcctgcctggtggaggaggtgtcccgcggtgcccccggcggtgtcggtggtgcgtgttgccgtggcgcctgcctggtggaggaagtgtccctccgtttctggatttgccttaatagctcagagaaggctgagggaaacctgtgagtgattgtaaacatcccatgctagggaagggcttgtgaggccacacagggtggcttccaccagaatcgacactttaaagagcacgggctggcagcatgtgtggtgtggagtcagcagggcggggagaaaagaacaaggcacgtgccccatggccatcgggtgatggggatggtgcctgttcacgaagaagagtcaccaagggaaggaggtgaatggtaaccaaagccaccaagatgtcaatctcaccgtacacaggattcttaaatatgtagtaaaaggctgtaaagccccacgtggcgcatcagtcggccatccaggcttcgtggttttgttttttgttttgtttcttgagacagtctccaaaaactccagattggagtgcagtggtgcgatcatagctcactgcagccttgacctcctgagatcaagcaatcctcctacctcagcctcccgggtagctgggactacaggtattgcaccaccatgcccagctaattttttgtagtttttgtagagttggggtctcactatgttgtccaggctggccttgaactcctgagctcaagggatcctcctgccttggcctcccaaagcactgagatgacaggcgtgagccgccgcgcctggcctgtgcaggccttggtggagctgctccttcggtcctgatggggagcatttcccaaatgtgccccatggaaaaggcaaggcgcagagcagggaccgtaggatgtcattgacatgaaaagcagaggaccgctgccctgtgtgtcgggaggctggggcctcagggcagagagcgcgttggccaccttcccttttgttcttctggagctgggtactgggtgcagtgttggctgttccagaaagtctatgagttctgtctccgttttggcttggagttctcctgtgggaggtgcccagcaaggatgattcccctcggccaccagtgagatgggaaccctcctcctcctcagctcagcagagccgtcgtggacctggggcccccagcttctttggatctcaggcatggggggcgcaaatgtcagtcgggagctgtcaagctctgtggaaggtttctgcatgtttgcccgagccccaccaggaggggcttcaaaagtgcttgtccaagtgcagagcaaggcagggcacagaggcagaggcagacacagcccccagctgggccagggctggtggccaaggggcttcctcagtgtgtagcctccgtggcagcctccatgtgtagtacatggtcagtagaagccccattaacagcaggggggactcggcctctggggagcggatttcttttgcaatatgatgttaaaggaaggtctggcattcagtatgttttttattttattttttattacagtttacaaaagcactccagtttcattggatttcaggcattttgcatgggatcgttatggctcagaaggcgtaatctcaggcattagattagagtgacaggcttgggaattcagaccggagaacagctgccctgcctgttcccttgtaggtgactggcaggtcttgctttataacaggaagtgctcccatggtggccctgacttgcccagcctgtggggtttgcttgtgttacctcatttaaaacccctggcagcacgaggttggtccatctagttccctagaaaggtgccatggactgaaggtctgtgtcccctcagagtcatctgttgagtgctcatacccctccctagggtgatggtattaagagatggggcctctgggaggcgacgagggcatgagggtgatgccctcattgatgggatcagtgcccttatgaaagagcccccagagagctccctcgccccctccatcatgggaggactcagtgagaagatgccaagaatcaggaagtcaccctcaccagacaccagacctgccagtgccctgatcttggacttcccagcctccagaaccataagaaataagcaatttgcttatgagcccccagcttatggtattttgtttcaataatggactaagacaaaaggttcattccagtcacttcctcacatgccatttccctcatccctgcctccaaggaatgtgcagggtggatttctgagcctttagttgctgctttctttccttttggcagagatactttcaggggaacctggtcacatagaacaacctccggttccagtagtgctgggcacacactgggtagcagtgggcagtggagaggattgcagggcaccagaaggcccatttgtttcctttctctttaaacatgatgagcaggtctgtgcaaataccccaaagtccaaggatgctgagaggccaaagaaagaagctggcattcagtttctcagagagaaacatttaataaggatttacaacgagaagccatgtctgtgtcttgggtggcggtagtgagacaagacggtggatccctgcaccatcacccccagacccagggcttatataccatagggaagggttgttttgggatgtgcaagacaattgaaatatggaaacctcaagggccatttgaccaaagggcaagatttacagtaagtacctgctcttatacaaggagcagtagatgaactggaaatctcagaggccttcccagaatgggggttaatcaaaagccaacatggcaggttagcatccaagatggagttgctttggcctccacacctgctgtgacctcatttctgagagacatatgctccaggggcttcttgagaaaggaacacaggcagtaaagttttgagacttttctcatttgaaaacagggcctgagggtggcaccctcatggaggagatcagagcccttataaaagagcccccagagagctccctcaccccttctaccagaggaggacacagtgagaaggcaccatctaagaaccaggaagtgaccctcaccagacaccaaatctgccagtgctttgatcttggactttccagcctccagaaccttgagaaataaggaaagggcagaatttgaaaatgaaaccaaaaactccacaggatggttaggcaacaaagtagaagaacttgtgcaggagaagctgctgtctgggtggcggatagtttggctgggtatcgaagtcccttcgaaggctgcacccatccgtggttctcattcagtgctgctggcacaaagatgctcctctgattcctcatccttggtgtgggacctgtttttctcccttctggaggcttattgaaccctttttgtgtcccaagtgtcctgaagtcccctcattgggtacctgatacgtgtctgatttttgtcacttgcccctccttgggcctttccatccatcttttccaacctttcccatgattctggtaaactttcttgaatggtttcattgattatttgctctcctgtctttcttgtttctatttcaaactcccatcactcgctattgggctttcagaactagtgttccactttatcttccccacctccgttttctacgttgtcttttttgtttttgttgttgttgttgttgttgttgtcttcaagacaggatctcactctgaaatgagacagagtctcagcctagagtgcagtggtgcagtcatagctcactgcagcctcaaactcctaggctcaagtgatcctcctgcctcagcctcctgtgtagctcggactacaggtgtgtgccaccacactggctaattttttgtagagatggggtctcgccatgttgcccaggctagtcttgaactgacctcaagtgatcctctcgcctcggcctctcaaagtgctgggattaaggcgtgagccaccacacttggcctctttgtcttttttattaatttgttttctggaagagttcctcagcttcctcacttaacctgtctattgatgtgtttttattggtgtttttcatttctgcccttttttgtcttctgaatattccttttgttataagccccgttcttctttcatgatgtagtatcttttatttctgaggatattgattgacgataggtttaaattctttttgaaaatgtcttctctggctggacacggtggctcacacctgtgattccagcactttgggaggctgaggcgggcggatcacctgaggtcaggagttcaagaccagcctggccaacatggtgaaaccctgtcactactaaaaatacaaaaaattagctgggcatggcggtgggtgcctgtaatcccagctactggggaggctgaggtaggagaatcacttgaacccaggaggcagaagttgcagtgaaccgaggttgtgccattgcgctccaacctgggcaacaagagcaagactccgtctcaaaaaaaaaaaaaaaaaaatcttctctgtcctctgtttcttaccaggtttttgttttttttttgatagtttattttgatctctggggatcatagtgcaggcccatctctctgatgcttgggggtaacgatctagtgtaatgattacaagtgagggactaggtgcagtggctcatgcctgtagtgcagcactttgggaggctgaggcaggaggattgcttgagcccaggacttcggggtcggcagtgagctgctgtgatcacgccaccacattccagctccagcctgagcaatagagtaagactgtctgaaaaaaaaaaacaaaaccccaaaacccaaaaaacccaagtgggcaatggatgctggtgatgggttgggatgcaaggggatagcggggagggcctcactcggtgctttacccggggaggtctgggtgggctgtggatgcaggggaagggcggggagggcctcacttgttgcttttcctggggagatccgggtgggctgtggatgcaggggaagggcggggagggcctcactcggtgcttttcccggggatacctgggtgggctgttatgggggagcccacatcaggccctttgggtctctccccttgggccagccggattgcacagggagtagccctccagcctcctgcctgggctcctaagggtgtcacccacatcctccactgtgcccagtgtccccagcccagacacccaccttctctggcctccccagtaaatgatcctagggagtccagcgaggaggggcaggcggccgccagggtgccaggaggggtcgggtgctgcggcagtcctcgcgcagacctccgttttgagcacccccacccttgtttccaggggaccctgggccatgaggcgtggggtgcgtgcccgccaccaccatccgtgtctctgctgggaatggctccctggtggccgtccgtctgctcgccacgtcccacccccagcctgctgtcgtctccttttccatcctccctgtccttgcaggtgtgtcctccctaaaggcactttctcgtggcttcaggagagagatgggtggcgtgggcttgccagcctaccaaggcatcacttagagccaggagccatgagcgtggcctccttcctgcagttgcctctggctgcccaggagggatgtggtgttgcctggcagggagtggagacagtgaggccttctaggggtcctcccttgaagggtcagcagaccaatgtggaagtcaccaaggatgaaggccagagcctgggggagggtggagctggacacccctgggaagtctgggagaggggctgagcctccacaggccaggggagcaggggaggaatggggccggggccggggtggcatctggggccactcccggtctcttgctgttggcgttgggagggatctcgcaccacagcagggaatcgaggccccggctcccctcaggctctcccttcaccggcaatgggcggcgggcgacgggtgacgggtgacgggtgatgggtgcagcacccgccccgcccataggagagccctggtccactgtggcctgtggatgccgcccctgacgtcagcatctctctctggcctccctgggagcagtctcagagcagtgaagagctcttcacgtccggtgctgtggcgatactaagtaataagatctccaggttttattgggcattaatatttattcccatgaaaaggttaaatttatttcactttaaagccctggagagtgcaaggtggagccatagtcgcctctcctggcaacggccctgcccaccacgtacccacctctcccacacaggccagtcctggtgatggcctgcaggacagggcagatgtgtggggcagttgggggcacccccttttggaaggcactgctgccagtggggccggtgagtgtgcagagcccagggccaatgtgtgcctcctgcaggcaccgggcagccctggccactcctcagctctctgaccccttcccccgctctctgcagcaggcaccacacgagccaatttcgcttggcacgacgtcctgaagcaggccctgggctctgcggctgctggctctgagcccatcgacattctgatttgtattttttcatgctttggaaaaaagaaatctatttatctctgcgtcgggtcccgctctgcataaccggaggcaaaccagcagccccgcccgctttctcattttcctgggaaggtagcagcgggtcctctgaggcctgcgtcaagaatatcgggctgtcggacgcgtcagtcttcaggggcaggtgacggccgcactgcttccagctctttggcttggtgtttgggcaccagctgacgggccagccagcagcagcggtgctgaggttagtccaggtcccctgaactcgacggccatcaatcccgggcctgtcatttgcaagcagctgcagcagctggtcgagcctcctgctagaccctctctccaccccaggtttttcttaagggtctgtgacggtatctgtcagtggagactcatgttagccatgtcaggagggcctgtgttggagaaggatggagggaacagccccgagcccagggggcctggcttttgctctgtgaggctcgctccacaccctgttcacttcctgatccccttccccaccctgccttggtccttaaggaggtgaagatggggcacgggggtgcacggccacctcctgtagaaccagggcaggccagccaccttctgagtagcttccgagctcctgaggcttggccacccgcacatcatggggtgggtgaggagcagaaggaggggccctccccacggctgcctgcagtctggccctcccctttttatctgggaaaaagtgtcctgtggctgctgggtgggtggcagggaggctggccgaatccctggccaatgagtcccgctggcaggaccccgagaagcagaggagctcgctccagctggtgcccctccaccccggcagcagcaggacgagcaggcgtgccagcacagctcctgggcacctgcccctttctgctcccgggtcccctggcttctcatatgtgcttattttgtctcccagttacactgtgagctgcttcagggcagggcccagcgttgcacggtaaaactacattaattcagactcattaattcagagcctataatagttcagacatgggagacgtgactctttttgagctaaaagttggaaaccgttttgctctgggtttttatggccacaattgcagaacctaatctaagatcagtaccttttttttttttttccagcaactaaaatcttgggaaattaaaggtccttaaaacatgctttcaattgtgagccagacagttctgaacccggcaaagagcaggcacagggatgctctgtcttggaagggggttttgtctgggaacgccacttccaggattcagacctcatgtgtgtccctcgggagcttccaaaataggactgcttttaggtggagcgtattggaactgatgtcagtgagaaaatggacaccctcacaccccccaaaaattagaaacagaagacctcactcctcaggccgtgcctcttctcttccccagaccctgggcaggtctcagcaaacccgggagaaccagagcctgactccaggtcccaaagttgtcatttcagggacctgaattgctgttttctcccatgtatgagtgtctgggctcattaagataactggggccatcccagccggaatgtgcaaagtccatgggctccgggagtttggagctgggtcaggtggtgaggccgggagagtcgcaccccctgggctccgtccgggcagcaggatccaggtccccatgaggctgaggtgcaaatggccccgctccctgagctgcccctgagttctgggggcagcgtgcccacagtacatggctggcttgggctgatggtgcagagggcacaggacccagagcggggcagagcaggaggccaggactctccatgcctggagccggactgcttcccggcaggggcagtcagaggcccggaagccggtagtggggcgcgcgcagctgccacgctcagtacaaactgggactgctgcccatgtctgcaacagacacacctgcgattgctcccagagtgtgctgaagctggtctgtgggacgtggtgttcaccccgatgctgttacactgcgagttacactagaaaagttacttcatgacttaagtcaggcttcagcaagctttttcttttgagacagggtctcagtctgtcgcccgggctggagtgctgtggcatgatcacagctcactgcagccttgaccgcctgggctcaggtgatcctcccacctcagcctcccaagtagctaagacagtaggcgtgcaccaccacactcacctaattttaaaaataaatttttgtggagacagcgtcttgctatattgcccagggtggttttgaactcctggcctcaagcgatcctcctgcctcagcctcccaaagtgctgggattacaggtgtgagccaccatttgagccagcccaaacttattgtaaaggacctgatagtgactgtttgcagctttacaggccgtgcattccccatcttgaatgttcagccctgcccttgtagcgtgaacacagctgtggatgatacataaatgaatgggcctggctatgtgccaataaaactttattcacaaaaacaagtggcaggccagatgtggcccatgggcccaccttagaggatatgccttctcaataaagagatttagagaaataagtagcgcagaagtgtttactcctacaattgaaagaaccacagttattgttttgatacatttccctgtcttgagagagctctgcccataattgggctcttgctatattcatgaccgtgcattttgtgtttcttcaggtaacagacacatcctgaggacgtttctgtcattgaaagcgtcctgtagaccgcatcttgccagcgcacacctccctgttgtgtgtcgtttatttagtctgtccacgatggttgaacggtttggttagagtcattgtgtgtgtgtgtgtgtgcgcgcgcgtgcaagcgtacttgtctttcagtacaaaagcaaaggacatctttgaattccttccttccttaggcgagatcgctagcagggggagattagggatgagcttgcctggagtgtgcaaagatccacgttgcacccgtcatctgcagcttggaagagctgctcagctcctccttgcatcctcctgaggccgccagggtctgctccatgctcactgggggccgagtaggggccgtgatgctgacgcaccctcctcctctgggggattccgcaggacccagcagccacccggcagccacccctccctctgctgtcactagctttgggcagcgcgtgtctcctgcgtgcaggagcactgtgaagcctctgctgattcgctggcaagcggcactgtccaggcccccagaggtgcacttggcagggtggtcaggctgccccctgacatgagcactgtccaagaactgggttctgcttggcatctggggcaccaagagggggggccttgctttgagaccctgctctgcgggccttagccaggaatgagaagaagcttatgggttccagcccagcccagagcagtgagaccaggatcttaggactggggagaacggtgggggcagagagcctgcagttggtgggcccaacctgtagatgagaggctgaccccaaggcagggcaatccagggccgtgacctgcagagaatgcggcgtatttgggaacaaagaccctcagtggagactggcagtgggaccctggcttcatgctccgcgttcctcacctgagtccccacctcctggtctcggacctccacctgtccccagaggctgttcagcactgagggggcaccgccaccctgcgttggccagatgcgcccagcttccccggcagctctcagggcggcctcacccatgcacacggttctagcggccatgtgtatcacaccacacgatgggacacaggccctggggcgtgctcaggcctttgggggccgcgcagacctcctcttgccctgtttgtgcctgatttctccatcagaaactaatgacacagccagattcccccggatggtgccttccttatctgtcgcgagtgctgacagaggaccaccaagttgggcagcaggaattggagcgggcggggcctgttccctccagtcactcctgcacagcctcacagacacccgtgtcccagagagtggggagctagacagggctgtggtgagaacagtcaggggcctggctaatgaaaatagacagcgaggtctgccctgccggaggactctgtggtgaggctccctccggcctgctctgaacccttcccagctgcagtagaacagcccacagaagtcctcatgggcctggctcacccttttcatgggcacgtggctcccacaggcacgcagccgatcagaagaggccggagttggtggctcgcagtgggggctgggcatgttcagcaggaggctgctgctaaggggagctgggtctcctcaccagccctagcgggtttctctcccacactgtggccctgctgagctgcccagcactcagaagcgactaccctgtgtcctcgaaggctgtgcttccctccctgtgacccaccggccttgcctccttcctgctgtttgcttcttgggtgtcctggctccccagctccctgcagagccacgtggagacttgcaggaatgctcccagccgccacctccttccagtccagccgtgggcagcctggcaccagcagctttgtcctggcagtggcagcccctggagcaggggatgcatctggagccgtgccagccccagccgggcaagggggctcaggccgtgctccaggccgtggcagtgcactccgtggagcgtgtctgcctgtcccccctccacgggtgcacacaggtgctttttttaattaaggaaaagcaattgcaaagccgctcaatacaaatcccctaagctgctgtggatggggatgccggggcagtcggcctgtccaggagtctgaaacgccggcaccatctgtgttcctgccactccatggccaaatgacaccaccagcctttctctcctgtgctatctttcattaaatgaattgagtttgctgggaattgcccagccacaaatattccctcctgctcagcatgataggaatctaactgttcccaagcccctgctcctggatccagcagaaggttccatggcccccctgggactgggtaaggtggggggaggcacgagctgcaggaaattccacaggaaggtttccgtcgtccccaaccccgtcagatttggggtcgtaaatatgtgagtgtctccaagcaaagtgtgggccacctggaaaggtttgtcagggcaagggaatagttgcgttgaattaagtctttcccttcccatttccttcatcccattgagcacgggtggtgacagcaagacaggtacttgaaatggaagagtgtctcacgatttttggaaatgggcttcttctgtgcctgtttgatggagaggcagaaagttccctgtgggcttctgaggctgagataagggttggcagaggtcggggcagcctgtgtctggcacgcggtccctgggcccgcctctccccagcaggagatgaggtctgtgccccgttcagacgggggcccgtgcctctgccccccacgccccgagcttccgcatggccctcccccatgcctgtggagactcccaggggctactttgtcccctagaatctagaccagcaatttccaaactgctgcccgcaggtcaactctgtccctggcctctgtttattaataaagttttattgacacacagccatgcgcatgcatgtgcccatcatccgtgatgctttagaggcacggtgcagagtttctcgaagctgaaaacactcagcgtttgggcctctgtgacagttggccagccctgccctttcccccttcctcttgaggttggggtttttccagccccatctcagcctcatcccagtaggtacgtgacagaccagagcttcctggccgcctcctgggatctgagtgccatggtggtaatcgccgcttgggcatctgggttcatgccctctggggcctggcttctctggccccaagtccctgaaatgttgagcatcaccaggtcacctgcagaacatccttcccagtgcccagtgtgaccaaagtgacgcagcggcagagccaccaagaacagtgacctgggaagggctgagggcgtgagagcggcaggtctgcccggcaggcagctggaggggacttcaactcatccttgccactcgcttgacgttcccaaacacaaggggccatcctattgggtgtttgctcaattcccccaagaccccaggcaagccggctgcagcacatggcacgttaatgtcctttcttagccgctgagtccctgagcctcccagaccctcagcatcttcttcgttaacattgtcgtccctccagccctgcaagctggaggcagtcaggtgaggcgtgcgggagcctgtgggccaccgtcgccctcgtgaggcctcctgaggaggggccgttgtcacattccgggattcctgttggttctctcagctctttggggactgctgttgtctcccttcttcccagccctcttggaacgattgctgttataaaatactccgtatccatttttacctacctgggggcacccgcgtctgacgggagggagatttttgcctggaccaacaggaggcatctgaacctcagcctcgctggtctctggacagctgtgcgtggggcagtgcccagtcctgaacctcaggcccctcactgagctgcgcccagcccccatttctcttgggtgtttgctcagtggccgttccaactccgtggaggcaaaccagggactcacaactgggggatgccgtttcctgacttgtgatagaagttctagaaacagagcaggagtgctggtgcacacctgtaatcccagggttttgggagactgaggcaagaggatcacttgaacccaggagttcaagactagcctgagcaacatagcgagaccccatctctaaaaattctcttaagaattagccagatgtggtggtgggtgcctgtattcccagctacttgggaggctgaggcgggagaatcgcttgagcctgagaggtcgaggctacaatgagccatgattgcaccactgcactccagcctgggcgacagagtgagaccgtgtctcgaaaagaaaaatgttctagaagcggaatgctcagcggtgggatggggtgtgggaggcccgggccgtgagccctacctgctctggggtggggtgtgtggagccagccgtccaggtgtggcgcgagggctcagaccgtgtcccctgccgcagtgcacgtgccggaaggacatggtcaagatctccatggacgtgttcgtgcgcatcctgcagcccgagcgctacgagctgtggaagcagggcaaggacctcacggtgctggaccacacgcggcccacggcgctcaccagccccgagctgagctcctggagtgcatcccgggcctcgctgaaggccaagctcctccgcaggtgagttgccaagggactgccgcgtgactgcccagcatcacggggggtggccctgctgggtggcccaggccccttcccactggcaggggctccgggccgtgtcccactcctccctttcttcctattcccaccccgcctcctctttcgtcctcctcctcctgttctgtttctcctccagtctgaggcacagtgttttctcgaggcctcgctttgctggggtgggtgggctctgctctggcgggcagcgtctgtgccgttcacacccgcgggctccccatactccctgtcatgtccccgccaggaggctgaccctgggtggccccaggccccgtgccattgcctcagcagagccaccagccacatggctccctgtccctctcactcaccgcatttctgctgtccggctactcgggcccctccctggcgctgagagcagtcgggttccctgcaaggactcaacggggcatcaggtggggctgcttggatttgagatcgtggagaggatttcagaaggccggccccggggcgtgaccctggatgccctcctcccactcagaacccctccctgcgtatcgccgcacagaccctcccagccaggtatctggtgtccgcctggaggagaggccaaagcatctgcagcctcttggcttctgaccacaagaggccatggggacacggaggcaggtcccggcctaggaggagatccacttcatgcccagagtgaaggcgagcaccggcctccccagcccctcctctgggaagtgtccaggcttccagggctctgagctgcccttggcacagttgtcgacagatctcactcctgtttggtgcccaaggaacattcagggagcccctgagcatgagctggagccgggagggacggcacagagtgggctcagccaactcctccggggaagggccagagagcaaacatttgtgacttggcgactttgcaggccaggcctcctgtgtctcgacgtctcgactccgcatggcaactcaagacccttgcagatgatagacagcgaagaaatgcgcgtggctgtgtccgtgaagctttgtttacagaccctgaaatccagatctcatgatttttacatgctaccaaatacgataatttttctgttttgagccacttaaaaatgtgaacattggccaggcacgatcgctcacacctgtaatctctgcactttggaggccaaggaaggaggattgcttgagtccaggggtttgagaccagcctgggcaacatattgagatgccatctctacaaaaaatttaaaaatcagctgggtgtggtggtgtgcgcctgtggtcccaactactgagaaggctgaggcaggaagatcacttaagcccaggaggtcaaggctgcagtgagccgagattgtaccactgcactccagcctgaatgacagagcaagaccttgtctctccaggaaaacaaacaaacaaacaaaaaaacatgtaaacactgttcctagcttgtgggtcgtacccagacaggctgctggcaggtctggtctttgagccaacagtggtggccttggtgtgggggcagcctcccccttccctttgagcagtgaccttccctctgcagccatccagtctctgctgccttgatcttgtcccagctggcgatggatggtgcccactcgagacccagccactgagcaccaaggttgggggcggctcagccttggccccccaccacgctctgcagaaacaggccttggaactggtttctgaaaagtcacttctggtccagaaccttctcctctaaatgggcgccttctttttcaacacgtccatctgtctgtgagtctgggactcctgggcggtctgggcatctgtctcggcctcctctgtcttccccacctcgcggcctctctcggagaatgttccctctgccccgagtgttttcacagcccctcctgacagccctgccaaggtgaatctgtctcttctgctcttgttctgtccttttgatttcctgcctcctgtgtgctcctcatgaagagctgcctcctggtgaggctactccaggcggcccccgcagcacagagctcgtgcaccccagctcccaggcccagccagacgtgctatttgcataatggttaattgattgtggctcaggctaattggtcaacagagtggattgccaataaaccggcaccacgttccaggagtggaatgggactagaggccgtctaaattgcctgccaggaggagatgcggaagccgctgcgctcaccgctgcttggaaccttctttgcacgcaggaagtggaccccccagaaccagcccttgcgtggcctggcctggcctccctgccccggccaccccctcacttctagtcacgacctgctcctcccaggagccccctcccgccctctcccgcgccgccatcctgggggctgccttcacccagcagcaagcctgaataacaaatgaagtcagcttcccaaggatataattttcttgaaagccttcagtatgtaaaacaaggctgattcactttttttttttttttttaaagtcattgggggtgcttttctctggagaggcagatgggtgactcacgttccaaagcccaagctgcccctccctccaccagggaggtggtcggttcccccctgagcagtgccctctccacgtggcctgccttttcccctgagccaggctccctccctgagggcatatcttggggccagggcagccctgtctgagcatctgtggctcaggctggatcgggagacacagtggactggctctgtctcccagacaaggggcttgtggacacaggcgggatccttctctggttgggggagcatcctgggccctgcagggtaatgagcagtatccctggcctccacccactccatgccaggagtgccccaagtcgtgacaaccacagatgtccctagacatcgcccagtcccccgcgtgggaacccctgccctagaccaagggatggcatcagggtgggcgccatgccctcacccccgtgcagtccagccttccctgccctcggcgtggctgtgggatggccctcatgtgtttaccaggtgccccatggggtgcggatggttcggcacagctgcctgagctcagaggacacggcctactccctgctcgccaccttacatgggtctcttccagaactaaatctcgttgagcgagcgttgggggctgtttgtattcttccccctgatggatgggtcgcctaaaactgcagcctggctcctggcgggtgccctcagcctccccactcccggtggcgctgtgcgttctggtgccctgcctgagccggagccctcacagtgctctctggcacccacgcgacgctcctccatgcaaactctttccacgcgagaagcgccatgtgcacgtgctccagcaggtacgcgctccctgcaggacatctgtgcacccgcctcaccacagcctccctggcccactgctgctctgtgagcccggctgggcccaggcctcgtctcccctacccctccgagctcggtgctgcctgtcccctcctgctctgccttggcctgtcgcccctgcgccagtgcaggacaccgccacgcctctggccccgactcctgccagggctgccacggctgccacaccccagctgcattcctgagccctccccaccaacagggacctcagccctcagggacagaacctcacgagcacagggacctgccagcccctgcagggagtgcgcagcctcagggactcacttgctgtctcctgtctctttcctagagctgcccttcattttctcaaaggtgaaattcctcagcacagggtctagtcttgggggtggggagcactgggccactttgggtcgggggtgggcggctctgagggctcagcctggggccagcctcccagtcctccccaccttgtgagaagccctgagccagcgcggcactgaatgctgatggtcccactctgggtgctgcaggtgccctgtgttactgggtgacagggccagaggccgtccaccccgcctcctgccatacaagctgcaaaggacacctgcttccaccttggaaatattagtgcagttatctggactatgtcccgacatttggctcataggaatgagcccagcggcgtccagttaagcctggcaggctaagtgcttatttatctccactctctcctgaaacgccactgaaacaccagagagtgaagtgcagagaacgggagagggggcagtggcagctgagcacgtctccaggctttgaaaagcagggaagggtgggcaggagaccccatgggccggcaaccaggaggacagccagcagggagcagctgggctgcaccatggggccacagaaagacacagtgggcagacatgggcagctcctggagggctgcagggggaatgtaccacggggcctcagaaagacacagcgggcaaacatgggcagcccctgggggtgctggggggatgtgggggcaaccagcagaagacagtgggtggctctgggcagaagggaggcgccttcctggggtcagcagtggggcccagctgccagcctcacatccccccaacccccaaggccaggagagacaatagagggggtgggggtcctctgccagagaacaaaggggcccagtggagcaaagccacatatgctgatactggggctctcctaaagtcacaggctcctgccctcagcagcccctgccactgccttcaccaggcccagctcacacacggcttggcaccgtgcacagagggatcaacggccaggggacccgacacattggaggctgcgctcccatgacaaaggcagggcctgcacagcaaagaagggcagagctccgaggaaagaggatgcagtgagtgcagggccctggagtgggccgggactttgcattatggaaaaagagccattgctgtgaagaagaaacattccaggaacgagtggctctcggatgttaccatctagagaagagacaagcccacagtggattgggaggcccttgaagaatcccctcccacagcactgacagacagagctggaagataggaaggatcaggaagtcagaggcgtagtctaggaaatctagcccctgataggagtttcagaaaaagaaaagtgtcccgggacccaaaggctttgcatttccaggttaaaaagtccaccagaaagtccgcccaagaatggaaattacccaaaccacaatgcatcgctgtgaaatttcacaattcctggattaaacaaaggccctgaaagcttccagagcaaacagatcacataaacagctcaccagactggggctgggcatggtagctcatgcctgtgatcccagcactatgggaggccaaggcaggaggatcacttgaggcccagagttcgaggtcagcctgggcaacatagcaagaccacatctctaaaaaaaaaaaaaaaaaaaaaaaaaaaattataaagaataggagactctgttagcattggatttacagtcataatgccacaagctaaaagacaaaggaaaaaggccttcaaaagtcagaagaggaataattctccccaaatcttttacctagccaaattgtcaagaaatgtgtgaggggaataaggatctttttagacacacagagtctcgtattccacctcctttctcaggaagctgctgcaggatgtgctccagctaaacaaggatgtaaatcgagaaagccatggggttgaggaaacaagatctaacccaggagagtcaaggggagtctcaagatcatgggagaaggaaccaagacccccaggggtgtcatggagagaaggggacaccctgcataggagaccacagcaggagtttaagagcaatggcagggagctcagagataccaaggaagctaggcgtccaaagcaggaggccagttccagaccccagggtgggggcagggaatgcggcccgagttgctctgtggctcatggatgcacaatgtttatggggcataaaagcgtaaacgtggaatttggctgcaatggaagacggtggcaggtgcagggagagaaggggacggtcatggaggcgagcaaggatggccacaccctcaacacctgtgccgggagccagacccagaaacaagcattgggtgcagaaacacgcgaagggggatgaagatgtcagggtcaggaagaggcgtgctcttaggaccccacagatgccccaagtgatggctgcccctctgccgtgggctgtgccccccttgctgtgtctgtgccgcccttgctgtgtctgtgcattgagccctacccagttccatgtagtgtgggacccaggggtctcagcctggcactactgcaggtaggaaagggctgggctgcaaggatgaggccccagagctctggttgggcaccaggacagttctggggccctctggggcagacacagtaaggcttgaaggccgtgggggtgcccctggaaggctgcagcaggggagggccatggtcggaagcgacctctagggtgagttttcagggtgggggtggagggagggactgcagtgggtgggagaaggggctgtggagctgggggcagctgaggccaggtgagcggcatgggagggcgcccttctgctggtgctgtctgggaccagggcgggtccactgtgggatcccggccctacagccctggggcattcccagaccaggagggcagcccaccttgggatgacagtggtgacaagagccagttgcaccccagcgccggtctgaagcttcctcctcctgagcctgctgtctccatctggggcaggcacccagcatttgcctagccccctagtggagcctgaggctgccttcccagagccgtccttgggctgctgttgtggagaacgttctctggagggcaggggccactcccgtgtcccccatccacctcctgctccctgtgttagtgactctggccccacgcccgcccctgcctgcctcccacccctgcccggccaccccgcagcgaccttgtgtgcaccatgctgtgtgatgccatgcctctggtccacccgctttctgccttgagtcattgtggtgggccatgctgcagacatcggggagcactgattctagcgagttaggcagctgaggagcaaggagggccggcagtgactagtgttctaggaaggcttcctggaggaggcgccccagaagccagcatggagcacagggcgggcagagtggctgggagcagcggtgggcaggggtcaggtccaagtgtcccgagggagcatgggctgctgctggcccatgtgacagcctggctcaggcagaggtgaggaggtcctggtaacagaagccccggcagcgggcccaccccacccctgtcagatgagcctgccccaccttggtgaccacttggtccttggaggggcagctgccacagggacccccgtgggattgaggtgtccgagtctgagcccatggggacaggggacacgggaagcacccggaagccgcagccggcattggtgattgtcccggaaacactggcgctcccagctctgcctgactgctggcaggcttgacgtggctggatctcaactggggaaggggagaaaggccactggggagccgggctgtgcggcctcgagctcatggcctagagaggcccctggccaggccagggcttagggcagctgcagggggtgggcctggaggaggtgcagatatcacatgcccaggggaggcactagtgaccagccaggcctcggcttctctgcactcccggcttctgcctgagccccctgggaaccaccccctccgcatctccaaaaagcttttgcttccttcctggaaagaccctggaggtccctgggggaacctggtgtgaggccctggccgctcagctgcagggtcacctggctgtcacttttcctccctttttcagcccctctctctcatttctaagaagtctcagctcagccaagcctgtaagcctcaggttgaatcccttacttggggctggtgtgcagggaccgggacctccccgatgtaccccaggattgtgggtgtccaggttgggcatgcaggatgcgcctcctcttggcccacgcctgccccgtgagcagatcctgggctcagggcgcagaggaggccctggcaggccctggggtgtgggcacaggtcagagcagcggagtgtgagctggggctcccatgcacctcatgggctgcagagagaggacccagggagttggggacagagccaggtggccaggaccaggcgtcctggggagttgagcagaagtcctagagaaaaaacccgtgaaatttacattctagacaaattagtctgaaagaaaacagacactggagaaagactgaggaggagaggaaaccaagtctagaaaggaagaaagagcagaccaaaaggccggggctgtcgtaagtgtctttttcgttccgtttgtcgtctaggcattttccatgagctgctgtttccctcggagctcacactccctgtgtctctgtcccgtggcacacgcggctcctgccgccccgtcccgcccgtcatcccacctggtgtcagtcggcttcccatctccagctgtcatcagcgtcccccgcttgacaccgtccccgccgtgtccattgccccgtctccctttggtctctcctcccaacacggctcctgccccgcaagagcagaaccccacccagggttccctttacccccggcctccagccaggaggccccctgctcatggagcgctcttctgggggtgggcgggggctgcgtgctgccggacagagtgcacagacctagggctcttccctccctggtctcccctcctgcctgataaacctccctctccaggtctcaccggaaacggagccagcccaagaagccgaagcccgaagaccccaagttccctggggagggtacggctggggcagcgctcctagaggaggctgggggcagcgtgaaggaggaggctgggccggaggttgaccccgaggaggaggaggaggagccgcagccactgccacacggccgggaggccgagggcgcagaaggtcagtccctgccgggccaggcctggcaccgctgttttcccacccccgtgggcatctcctagaaggaaccagtgcctgctacagccagagtccccgttttgtaagaatctgattcagtggctttcttgccagggtggggcatttcgtgaaaatagacatcgtaaggtggaggccgtaagaaaagtgcctccgtccccagaattgagaagagcagttacgagaggccaggcgcagtggctcccacctgtaatcctagcactttgggaggccaaggtggcaggatcacttgagtccaggagtttgagaccctgtctctacttatgatataaaaaaaatttaaccaggcttggtggcttgcacctatagtcccagctacttgggaagctgaggtgggaggttgaggccgtagtgagccgtgtttgcacctctgcactccaacctgggcaacagagcaagacccagtatcacaaaaataataataataataaaagaccaggatgctgtatatggcccagatgctggaacgtgcctgcagcagccacagccacttgtgggcagagggctggtcctgactgtgagctggggcccccgtcagcaggtctcccacctgccctcgggcctccccactctcccggggctggcaagacagggggcagccgccttcccacaggagtgtgaaccagcagttgtgaacggggtgcggggggccgggaggcagtctcagaaacattaccttccccagggggaggttttggctgtggaactcccacctgtgagtgtgtaaaggttcctattccagggttgacagcattttgtttctggtgactgggttttatcttctcagtttagagctttagctgcttgggagtctgtgcaaagtggctgttcccagctagggctccccgctgggagcccttccctctcccaccctttccaggtgccatgcagggagcaggtttgtggggtgtgctggccagcctgcctcccaccaagggctgcccccagccacagtgcctgaggcccaggtcatgggggccacattcgccggagggtcctagtcctcagtttccctctgtatgagcccaacatgacctggtctgcctctgaggtgtcaggtctccaggacgcgctggtgcccaaggtgaatattgtccttggaacatggcaagaggcccagctgtggtgccattcagcagatgtgaggtccctcccacctgccaggggcagccgtggggtgcctgatctgtgacgatggggtcgtggccctcgcagtactccaggaggcaggcacgcccctgccctccccatatacatggggcagatattgagggtcacagtttgccagtgcctgtgggcctgaggcaagaaaagtgagcatccctgggggaaagagcagaggccgggggtgagtttgcccctgacggaccacttactcggtggggtacgtgggccctgcgtctgttcagcacgcctcaggagggtctgccggcctagagaggcaagacgaggacagaaaaggcatcgtgggtagaagagaaaagcacagctgtcgtggcactgttattatgtagcgacaattctctactgagaagcagcaagcaagtctacaggcagccgcctggtgactcggggatcgagcggagctgccagagatgagcgacaggcacagaaacccaatctcgcccctcatctgcgagccgctcgcagcaaacatggctcccaaagatgccccttatggtgctagcaaccagaaataatggatcttagaataaacctaaccaaaaaaatgatctttatggagaaaattaagagactttttttggaaataagaaagaattcctaaataaacagaaggacctaccaggtgttaggagagctcttaagcggacaactaacggcttcccccacattctctgcaggttcagtgcagctccatttgggatcccagcagggtttgctgatttaaatgcaggcggatgaaagcccaaggcctgtcaagaggctggggccacccttccagaaggcagggcttgccacagagcttgcaggacccaagcaaagatggcaaaaggtctaggaataggaatcccggagcagtggacttggtgtgagacctcagtcccctccctccccctgtccacgctgcggcctctgtgagtgccctggggccgctgaaatgaaggaccatgaccttggtggcgtaaaacaacacacgctccttgtctcacagctctggaggccaccagtctgacaggcctcactgggctaaaatcaagctgtgggcagggctgcttcctcctggggggctccaggggagaacctgtttcctgcctgtctcagtgtctagaggcgcccacatctcttggctcagagccccttcctcctccttcacagccacagtgcagcctcttccggtctctctctgactcttaccctcctaccttctacccggtgaggaccctgggttcccaggtctcccagatgctctcccatgtcagggtccttcactgagtcccacctgaatattccttctgccacgggaggggacagattcccaggctccagggataaggatgcagatgcctttggggtcattcctctgcctgccacatgcttaggcatttctgtcaaaagagaactggcaaactggaaacacaaagcaggaaagtatataacccaaggctaagtgattgtttattaaaaagcacaaactagaaaaataaagatgaacaaattcagtgactctcaaatccactgctgtttatcaaaggatgaacctttaagaaagtgagaagacaagccgataagtagggaagacactcgccacccgtcaccgaccaagagcagataagaatgcctgaggaccaggaggggctcagccccccaaggaagagggcaccagaagaggagatcccttaggctaatgagcccagcctgctctgggaagcgctgcagacacgctgctgtgtgctcctcggaccaccagaggtggaaacacccaccgtgcccagccctggaagccggtgcagcgggcagcccagtcccctgttgcctgggacctgcgtgagtccggctgcattggagatggacctggccttatccagagaagtggagcatttgcaaactgcacacccagagctgccctcagggcacgtttcctggagagaccccctgctggtggggcactaggactgtgcagatgcagggacaggcaaactaaccaacctccatcgatggagagggacggggaaccagcgcctcctgtcaccctcgtctgccctggaggcatgagcgctggaggccactgctccacgccctgtggctctcggacacgacctcgcgtggcacggggcttctcatatgctgtgctccgtttgtttaaagtccacagatggggcggctgaaatggctgaaatgtacaatctcacacctgtggaagcgggaaggtcacggtccaggtgtcagccgggctggcccattccgaggacccaggaggacctctcccaggcccctttcctgggcttggaggcagcacctttgtgttcccgtgttctcccggagtgtgtctgtccagattccccccttcctaaggacactggccacgctgggcctggcccgccccaagggtctcatcataactcattccgtctgcagtgacgcccttcccaaacaaggtggcaccccaggtccgggggctaggactgcagcaccattcaacagcacagggactcagctctgcagcaggcgaggggcttcctgcagggcaggagcaggcacaggtgcccatttgtgttgtcatcctgcagggcctgtgtctacactgcaggtcctctggggtttgggaaatcctcagaaataatgcagactccagcaggcaagctgggcgcctgagcatgggtcgtgctggtagaggataagttcctgggctggctgcggtagccaggcctcctgttttctgagcaggagtctgtgtttgattctggagacggtgagccccaggcgaggtcggcaggggagtgggggatgggcgcagttcaggttctattccaagggggactgtgggatgtcgctggagggactggcgtgggacagggaggtggctgagccgtgaccattctccccacaggatgggctggcaggggtgggctgggcttgggctggggtccctgggggtggggggctgcgtgggccaccttgagcttggaccttgtgaagctgcccttctcacgagtcagaacgtgctgggggctgtgtgtggtctcacaggagatgggtgagttatgggaaaacaagcaggcagagaaagatccaggcttgggtctggggacccgggcccacccaagcccacccgttaactgcccatgtgaccctgagctgggacaccgccttgatggacccttcaggagggcagagataagaggacacgcatcctccccaggccggcgcggtgggggaaatcgggcaggctgctgccgccgccgctgccacctgtgggttcaggcagcgaggaaagtggcccagtcctgggaaggcttttacagagtggagctggctggtcagagtctgtcctgggttctcagtggggcctcctgggaggggtcacaaggatcccccgtaccatgggtgtcttcctccctcttgagcagactctaggggctggccagcctctggctggaggaagggcggccaccagctcctgtgacttgttttacccaactggctagcaaaggactgtggcttcttttccttttcctttcctttcctgatggagttccgctctgtcacccaggctggagtgcagtgacgcaatctcagctcatgcaacctctacctcccaggttcaaacgattctcctgcgtcagcctcccaagtagctgggattacaggcgcccgccaccatgccctgctaatttttgtatttttagtacagacagggtttcaccatgtcggtcagaatggtctccaactcctgacctcaggtgatccacttgcctcagcctcccaaggtgctgggattacaggcccgagccactatgcccagccttcttttcttttctttttttttgaaaccgagtcttgctgtgtcccccaggttggagggcagtggtgcagtcacggctcactgcagccttggtttcctgggctcaagcagttctcccacctcagcctcctcagtagctgggactgtggacgtgcaccgcaactccgctcatttttcaaaatttttagtagacacggggtctcgctatgttgcccaagctgctcccgaactcctgggctccgcctcagcctcccaaagtgctgggattacaggtatgagccactgtgcccagctttcttttcattaatgtgactaactgttatttactaatcttcccaagcccactgacgagacagccacaccctccccagccccggcgttacctgctctcacttgggcctcaccatggccttggcctccaagagactcaggttcagggaggtcctgaaccagggggtcctggttctcctctggtctcccctccccatgcgtggtcctggctggatgggcggctttcctcccctgacagtggcagttgcccgctggagagaagcctacaccgcgtgggagggaggggaaaccaatggctcgtccagctgcctggcgtaggtgaggccctggcctggtcactcaccatcctgtttaaagatgtacagggcaactcgctccctcccgagatccccgggggtccacacgcccggtgcagtggtcacggtgccaggaggctgggcctggtgcatctctgaggcctgtggcttccacgggtctctgaagggatcagcccccacagaaaggccagggaccagcgaggagggttaggggctacgttggtggcacgtcagggtctctgcccagggagggctcaggactggtgctgcccaccccccgccccccgccctggacacccttatctctgttccacgacagagactcctgggaaggacccaatctggcaggggtgggcgttttcttggacacagccgttttcccgggagcccgaagtcccaggagcctctggacgagaggtttatctcgagagagcctcataaatgcatgttcacagtcaggggcacgacaggaaatgcatgccacagtgctgcgggaaagatttcctaaagcggtttctggtcctccttgaatgccagtttcacgcccctaaaagctatgacgctgaggcacctttcagggcctagcagtggggtgtggggttttgtgttttcatatggaacaagctgggaaggggccagaacctgttgctcacaggggccagggggcatcagcatcggggaggaagcccctcaggaggagaggtgcctggggggcggttgagaggctgcttcccagtggctgctggtgtcccctatcccattcttactggctgcttcaaggtctgggaagagcggccgccctattgcccagcgctaggagggactagcagccccaccagccagccctaaccccagaaccaagcagaaagcaggaaggcggcctcgtccacctctcctgagcctccggggaggccccgcctcctggaagaaggcctgcagtgcaggacacacagggtcagggggcagagccaggatggggacccaggagggctggcatagtgccgtcctgcctcccagagggtggaaaggctgcggtgagtggggcagccagcccccagcccttcccctcccctcgccccggagtgctgctctcaggagaggcctcgtggctggtgactggttttagaacacggaaagcaaaggctgccatgtctggagggcggccccagctcatagtgaggggctgtgagctcagcccggggacccgccagcacatcccagctgggcctctgggaccgtcaggcgcacccggctgcgggttcagcacgggagggtggcagtgttgaagggggtggccagagagcccctgagaccggggctggttggcccaggcatggaagccaagcacgaaacttgagggaggggccccataagccaggccgaagctggtgagttgatctcggcagcctcggagcaggaacagagtggtgtccttggaaatgggtggtttcttgccccctccacagggcagcctgggcctcgggcctgtcttggggtttgctggaggctctggtggaaaccccggcgctggggaggagtggcctcgccaccaggcaggctagtgagccctggtggtggggtttccgctgtgacaccttccctccacccaaaaagagtgctagcagggcctcagctggctgccctcgggggcctgggtgcatcctgggccccatctgtaccatggtccctgctctgtcctgaagcccctcacccgcttccctccctcaggccaggcaggtgaggggcgtgccaaggtccctgtggagtgtagtccccatggcagggacagagccccaaggaatggcccacagcaaggacagagccccgaggaatggctgcggggtgtgccgccgtctttcagggtgtccttcctagccttgggcatctccctctaacagggtcccctgtgtgtctgcccgggcttcactgagcctgggagccgacagggagagggctggaaacttgttcttgtgagtttgagaatccagggcaccagcaggtgcgggctatgcgtggagtgcgttgaggctgccgccattgtcattcactgctgtctccagacaggggatggggtggcactcatcagccgggcacctgaggctcaaattatgtcccactttgtctcccatgcctggtccctccgggagacagaaccaggcagccaaccagggagggctgtggggaagcgggacttggggccatccctgtccttggaggaggagggagagagccctacagtgtggcccttggtgagaggacagcccccgggaggcctaggggacgatggtggcctcagctccccacccagccttgcctcccgagcagaaccagggcctggggcggtcacaccagccgcccctcagctcccaggaggccccgttggtcgggggaggatgccagccccttagagaggcggggactccccagggaccctctgagcaggcacctgtggtctcgtgaggacagcccggctctgtgtctctggccccacagccctggctggagtcccctgtgcacagagctgcctgttgtgtgtgaggacagcccagctctgtgtccctggccccacagccccggctggagtctcctgtgtgcggagctacctgttgtgtgtgaggacagcccggctctgtgtccctggcccccacagccccggctggagtcccctgtgtgcggagctgcctgttgtgtgtgaggggtgggtgggggtgccggctggggactctgatgagtgtttcctcctcgcctccttccccaattcctcatgtgtgcactgagtggccctgcagctggaggccgtgaggctgtgtcctggcatcttcctccctctcctgagaccatcgatgccccaggtggggccctcctgggccagatcccacgccagcccctgcccttgaagttgaacccggcttgggaagccggcccagcagtggggggcctgagtcccagtccccggtgaggctggatgggcaccgcagcctgcagtcctgagtgaggctgggcaggcgctatcatggacgaaggaatattggatttccttaggggaacaaagctgtttgtcctcaagtgccttttacacacgcaggacagtggctttcctgacaggcgctcggggtgaggcgtgcggcctctgcagcctccccgggctgctccagcttccagccctggtgaagcttccggcccctcccctctgcatctccacgcctctgctcccagcctcccagggagggggtgcctcccctctggcatcggcagggaaaaagtatttcttcccacgccagcctgtctgctgtgtccagtgtttacctcccctggccagataacagctgaggggccagataacagtggaggcggggggcgggggggggggtcatataacagcggggggcccggataccagcggaggggaagactgcgctccctgcaaggccagacaggacctgggggtgttccaggctcccctgccggggtggaggtcagggaggagcccggccagtgcccccagtgccccagaatgctcaggactagcaggggtgggggccagggcagtggcgggggctgccttcaccttatggctgctcgcctgtccttcttgagaaacaggtgggcgtgtgcctgccaaggacaccgtgggcggtcccccaagcctgcagatggagctgggtagggtgtggggaggagagctggagcagggagggcagggccgcctccactcctgggggaggctgtgggctgggggccccttgtgggagtgtgtggggcagtgtggcttcctcctggctgcagggtctgttgggggagggtcctcacttgacccttactggggtcagtgtgggtcaagggttaagtgtcaccctcggcccttgggagcctcattgctgagggtctcagcgcttaccactggtcctggcatcacggactgtggagctgggggcagcccgtggtgggttttatagcaagtggtgagatgtgggcgctgtgctccaaaccagaccccgttaagtgccacatggtcaacagtttagtgtgcagaaatgaatttccttctcttaatttttccttatttttccagcctgttgggggaggtggaggtggtgaaatgttagcagtgaccagttcatcctgatctgcttgggaccttccagttttagcactgaaagccccacagcccaagaatcccttggatatcaaccacggttcctccttccagaatgtcccaagagccttagggcctggagacacacaggtgggggcctgagcccctgtccccctcctccagatggagcaggcagggccccagggccccagggctcacggtgttctggggtccacagtgtgctgtgcggccaggctggtcttcctcgaggacagggctccaagttgccgtgccacaacttaccctgagtgcggcggccctcagagggattgccccggcacgagcttcccacagcccgacacagagcgccgctgggctcacatggagctgtgtgcagggacaggccctcctgggcactccaggacagaaacctttcccagcatctagaggcccctgcatccctcagctcgagtcccttcctctcccttcacaggcacagcgcagcctcttccagtctctctctgactctcaccctcccgcctcatcttgtgagggccttgtgaggacatcgggcctcttggatcatctaggatcacctcccatttcactcagtcccacccacagagtcccctctgccagagtcccccatgtccctctgtcatgtcccacatccacatgtccaggagagttgggacccgcacgcttctgggggctgtgattcagccagccaggctgctcatcccagttttattttatttactgcaaacccgtcctggccccaaagtaaaatgccaccaaacacatgagtcaactgtcccctccctgtcacctgtcaggaaatctccccattgctggccccggggagttccacgcggaagggtgtcgggccccacaggcccatctgacgcttcctggttcgctcatgtgaccgccaggttggggttcgttgattaagattttgtgcgttgttcaaggttttactttcgtcaaaagcaaaaccttaacgtttctacatcaacagtagaaatgtacgtaattcggatacacgagaacacaaaaagtgcttctcccccacctccaccgggaaagtgccatttggtacggcccacccaggtgggagcccagaagacagagcagcctcccctggctgggtttggtgacgcgtctcctcacctcccgtgaccccagaaggcacatagagcaacacctggtgggtcctcacaggccttggcaggcaagtgccgctgctgcgcctgcgttgtggggagaccaaggcctgggggtgcctggccaggtgcccctgcggtgatctgaggtggcccgaagcctgtgttctctgcccacccatgttcgtgtggcctctctgggtggaaggagccctcgaccatcccagtcaaagttgggggatttctggggagcgtgggaccagcacttgagcccgggttctcctccctgacctccctctcctcttcccacagaggacgggaggggcaagctgcggccaaccaaggccaagagcgagcggaagaagaagagcttcggcctgctgcccccacagctgccgcccccgcctgctcacttcccctcagaggaggcgctgtggctgccatccccactggagcccccggtgctgggcccaggccctgcagccatggaggagagccccctgccggcaccccttaatgtcgtgccccctgaggtgcccagtgaggagctagaggccaagcctcggcccatcatccccatgctgtacgtggtgccgcggccgggcaaggcagccttcaaccaggagcacgtgtcctgccagcaggcctttgagcactttgcccagaagggtccgacctggaaggaaccagtttcccccatggagctgacggggccagaggacggtgcagccagcagtggggcaggtcgcatggagaccaaagcccgggccggagaggggcaggtggggtggagcgggggaggcagggaggaggggggcaggtggggtggggcaggggaggagggggcaggtggggcacaggggagctggtggcgggggagggggcagggaggaggggacaggagggctgactgctggtttcacagggaactgtggctcttctcacagggtaggtggggtgtctgtacttagagaacagaggagccctgtggttctttgctgggacagtcaccccaggagaggagactcaggcctcaggcacgccgagcccctgtgtggctccgagggagccccacccaggggtctgtagcggggccctcactacagcctgttgtgtgtttcaggcaccgtccacattttccaaattgaagatggagatcaagaagagccggcgccatcccctgggccggccgcccacccggtccccactgtcggtggtgaagcaggaggcctcaagtgacgagggtgagtggggggtccccaggtcggctctcatcagccctgctccgcgctctgctgctgctggagggggggcctggctcccctgcggcttccttcccccacttcctgggtctcctcccctgaacccaggcctttctgtggctctgccgtagcgacaggctgtcactggggcaggtggtcgtgcggggaggcagctgctgttagagatgctcggctctgctctgctggctgggctgcccatgatgggcggttcagggctggggagcttgtacctccccatggaagattcctcccagggctgagcacaggcctctccaggacttggagaggttggaacaaaaggctcccgcgaagctttgagtgggaggggaggagatggaatcttcgatttaaccctcagccgagagctgctgtcttgtgtgcagaagtcctgctaagccagtttttcaacttctgcttcggcctttcattggggatgcatgtagaatctgaaaatggtctggatggcgtctttcatcctgcatgcaattggaggggtggggagaggagggttctagaagcgcgtgggatcacagggcgggagctcccaggagtggaggaatcggcacggggacagaggaatgaccaggggcccccgcgggctggcttgggaaggggtcttgccttctacccaggtatccttccagaaggcatctctggggcctccgtggactcccccactccccacaccccactgtgaccctttggtgagaccggagcatttgcctgtgagaccatcacggccccagaaccccaggcattctggggttgtgagtgacagacgcagccagtggctctgttctcatccccagggcctcggggccgcttagggccttccctgggctccgctggcggtactgtctggtttgggttttcagaggagtcttggcctaagggcttcctgagtccaccatgggagacctgggcctccacctcggggagcctgccctgccctgccctgccctcctctaggtgaaccaggggcagtgccacagctgggctgatcccaggaccccaggctcccctttaggttgggctgaggattgggccacaggagtgggcaccccacttcctggggacagcacccctgtgtccacaggagatgcagggaggggacgtggggagattggggtgcggcagctggcaatggaggccattagagttcaatgggaacaggcaacaggtgggagagagaccgccgcggcttctcagcagcagacctgccttccgggagagtgtccccgtcacgcagctcttcctggggcgggctgccttggcttcctagccctggtcacggcccctcctgactccctgtcgcactcctctggcacctcccttgagttcagtgagtctgtgcccacctaagacaggaaggacagtgtctctgagtctcggctggtcactgccgacgcccccactcagactcagaccccaggacgggtgtagggcagccggggcagggctgggcactgagtttggccagtccttggcccagaaggccctgggtgagtggacggctctggatgtccagggagaaccaggtgttgggggaggggctcagaggaaccatgtttgggggctctggcctcaggtggcagtcagccgagacagacgtgtccccctcctgttgatgggatgggacgctgcagtgtcagcttgatgggcattgtggagaatggggcagccaggaggcaggtggagggggagctatgggccagggaccctgtgggcagccagggctgtagacccggggccatcccctgggcagttggggtgattccttggacgagtttttagggggctcaagtgtctctctccctctcccctctgttcttctagaggcatcccctttctccggggaggaagatgtgagtgacccggacgccttgaggccgctgctgtctctgcagtggaagaacagggcggccagcttccaggccgagaggaagttcaacgcagcggctgcgcgcacggagccctactgcgccatctgcacgctcttctacccctactgccaggtgggcaggcgggcctcacgggtcccagagaaccccaggcaggggcggtgggagagggcgagggaccgggcaccccacacgcctccctctctcacgcagggcagggtgttggccagcaccccgagttgtgagggcttgttcctgacagccgtaggcagagcctggtctctgggttttattggaatgaagcttactaacgtgcccatgtgcaacatgagccatggtggatggggcagagggaggctgcggaggctcggggtcactgccctcagggagcgcccgtgtctggtgggcgctgagatgggccgggtggtgtgggagtgcagtgaaggcccaggtacaccacctgggtggccgggcggggctcccgcaaaccctggcctgtctagctgagctgggcacctggctaaggtcctgtttctggtgctctttccatgctggcctcgcctgtcctctgcacccagatggggagctggcctctgcccacggccatcccaggcatcagcacccagcccagccgttttcctcggatctcttagatccccccttctctcttcccctgggcatgcagcctccccaggacaggacctggccacatgctttgcactcccagctcctagccccatgccaagcatgtccaggcatcagcagagctgccctgggttggggacgtcaccccccaggcctgtgcgccggccgggtctgggtggacagagccagggagagtgctgtgccgagggtggtgagcctgtcttggggctctgctgctgggagctggatttagtgctctggttcctgagacaaacaagacctgacagccgacaccgtctccaggcacttgctgtcctttgtgaggccagagaggctgctgggagccacagggcctggaatgccacttcagacatgcgtcttcctaattccccttgccaggcagagtgtggagactcgttcatcacacaccacccccagcataccccagcgccaggggccacccagcaccaggggccacacaggccagcctgagctctgtgtctggatgcaaccctcatgggaaggtcttcggcgggttggggacagggtcagacagtgtttggggatcctgactttctggaggagtgagaagaggggccgaggtggctctggccatctccccgacctccccctccagagccagggggtgtcgaagcctggggcaggtgccctgagagaggtccgcgccgcccgcccgcctgccccacacatggctctgtcccctgaaggtcgcctctcccctacaggccctacagactgagaaggaggcacccatagcctccctcggagagggctgcccggccacattaccctccaaaagccgtcagaagacccgaccgctcatccctgagatgtgcttcacctctggcggtgagaacacggagccgctgcctgccaactcctacatcggcgacgacgggaccagccccctgatcgcctgcggcaagtgctgcctgcaggtccatgccagtgagtgccactgtggggcccagaggagctgcgccctccttcagggtgttggtgggggtgccggtgggggctccatcctcccctgcggagggccacaccggcccctctccccaggctgcactttcagggccagggcaggggcctcccccggtgacttcctgcaatttctgactttctcatccttcccgttgtggtcccaccatctagagcagggggaaaggctgtggccatggaagggctggatgaccgcatgccaccctggggcaggacagggcctccaccgcccccagcatccagaagatgccagtgcaggcccaggtgctggcctctggtgccagcctctgcggaggaagcctctgctccaaggggcactgggctcatcccaccctgtccctgacacccagaagctcaccctagggccagagcaagaaatgggccaggcaccccgtctctccgcaggctgtgttccctgagaatggctgtctctgccaagcagcctttgggggcaaacatccctgcccttgaccttggcccaggcagggttcctcctcactggccctctggacagttctgccgagtcttctccaaggcctgggaggcgacaggaggaactcaggcagccgctacgcctgtgatttgtggctgtggttgaaactgatggtcacagtgagattgcagcgtggtcagggcgtctgatttatctctgctctcagggacccctccccagtcctgaggctcgaccatggtcacagacaagaaaatggatgtctgtctctttcccacgcacgggggggcggtggcaggaattggactttcagggaaggaggagggctctctggagacgtttaattttctgtgcccctggcagccatagatctgtgtcggtttcctcctggcggtggcctgcctgggggctcgcgttgtctcctggctgggaggctcttcactctgctttgctgggcctgggtttgagatgtgcccccggggcagatgggctccctgggggaagggttgccgagggtcccaggcctgccacagccgggccgccccagccaggctaccccagcagacgcccccacccccagccgtgcccaccaccctgctgctctggaggcagtgaggtccccgcccccagcctcttcagtgggccatcagcactggcagagagccccttccacactgggggcagtgatccccagcagaggcagagccctggggggcaggcggcacccctgccctcgctctgggggcatgattcggccttttgtgccctttccccatttccagacccagggccacatcccacagtgagtctcccttgcggctttggcctttctggacatagcaggaggagctgctgttgggggtgcagacacccaacaaggaggggccctcaagacaccaccaggctgagcgcggcagacccagctggagctcagggtccctgcttcccctcctgcgtcctctttccacacaagtagcttccagacctttctctcgctccacatgcagtggcctggattgaagctcagagggtgggaacagcacgcaccctgaatgctgcagctgcgtgcggaggcctcgtcactccacatacggacactggcccccaagttacccggcccctccccctgagtttcactcggctccccaagtctcacctgccccccagatctcagccagcccccgctgtcttccaggttgctatggcatccgtcccgagctggtcaatgaaggctggacgtgttcccggtgcgcggcccacgcctggactgcggtaactcgctccccgcagcgggggtggtgctctgagaggcctgggccccggccccactccagtggggtgactttggggcgtagtctcccctccgtgggcctgggttccttcacctctgccctgagggggtggaacccaagggattcccacccgtcactttggtggctgctaggttgaaatataagggccgtgggctggggacggttggcagatcaggccccaagcagtgtgtggggagcctgctccgagccctgctcatccagggctgtctggtctccacaggagtgctgcctgtgcaacctgcgaggaggtgcgctgcagatgaccaccgataggaggtgggtggcaccgcgcgttggggctggagggccggaggggagcctgccctgggctgaggctctgcagggtgtgaccccagtgcctaggggttgaccatcacctccacataaccgccctgtgtcatggatggggtggccagggctgaggaggagcatacgcctgcaccgaccttcctgaagttccccaggccctgacccagccgacagccacatcacgcccagcccctctgtgaccagcccaggtcctcagaggcgcacctgaccccgctgcacctgccctcccaggtggatccacgtgatctgtgccatcgcagtccccgaggcgcgcttcctgaacgtgattgagcgccaccctgtggacatcagcgccatccccgagcagcggtggaagctggtaggtccttgcggtcgaggcccaccctgcccgtgcctctagggctgccggccatgctcggctccccacctgcgcgatctgaagcggtctttcctccaagctctgcgtctccatgggggtggtgggcagctttcaggaagccagtgatcccgacttcagcaggtgtgttattttttgaatccttccccgaggtgcaaggtacaaaaatcagaaggcatcaagggtggcagagataagcaggccccgtcaggtgtggccttgggggcatcctctgcagaatcgagcaccccatgcagtttccaccttcccacaaaagcagaggcaccgcacgtgccccgacacaaccgggctgtctgatctttgctgtttttctaataattataacaagcctgggcaacacgatgagaccccatctctataaaaaaaataaaaaacactagctgggcgtggtggcacacacctgtggtcccagctactcgggaggctgaggtgggaggatcgcctgagcccgggatacccaggctgcagtgagctgtgatggcaccattacactgcagcctagacaacagagccaggcactgtctcaaaaaaaaacaaacaattgtaacaatgcttagcgtgagatctgccctcttaagaagcatctgaggttcagtacagcattcaccacgggcccagtggtgggcagcagggctctgcggcccgctcacccgtcctgtataactgacacttcacacgtgctaagcagcagctccctccgcccaccccagcacccagcactctgcttctgtgtgtttgcctgtgttatagaccccacgtgagtgggattgtacagtctttattcttctgcgaccggcttctttcttaagagacagggtctctcactctgttacccaggctggagtgcagtggtgtgatcacagctctctgcagcctcaaactcctgggctcaagcgatcatcccgcctcagcctcctgagtagctgggaccacaagcacgtgccaaaaagttaggttaactcccaatttttttttaaaagatggggtctcactatgttgcccaggctggtttggaactcctggccttgagatcttcctgccttggcctcctgggtagctgggattacaggcgcgagtggtgtctttcatttggcatagtttcctcaaggttcatccacattcattcaacccaaatatggcaggagttccttcttttcctggctcagtgatgtgccaccatgtggatggacgacgttgtgttgatccgggcacccgccgatgtctctgccttcaggctgttgtgggttgcgccgcagcggatgtgggagtgtggttgtggtttggagattctgatgtcatttcctgtggatacagacccagcagtgggcttgctggaccgtcgggcagctctgtttttagcactggaggaaactgctctcccttgcggctggacggactcccatccgcaccccccgggtgcagggctttccccttcccctcgtcctcactcacacctacctttgacttttttgtagcagccgccctagcaggtgcgaggtggtctcgctatggtttgatttgtgttctcctggcggtcagtgacgctgggcatctttgcacagtcctgttggccatctgcatgccgtctttggagaaacgtctgttctgctccttcgcccattccgtgcctgggttgcttggccttttgtggttgagttggaggatctctgctgctccactcttggtgcacattgaggccccccgtagatgcgcgcagccaccttgggcgtagcggggcctcatcgtgggggcttgtgaagcttcctcctgctctcagcaatgatggcccccctttggggaaccccttggagccacagggcagtcaggagtggtcagtgctggccaccagctggctgtgcacttgggacagattcctcgacctctctgtgcctcggccgtcccttctgtgctgtggggttgccacagtccccgccatgcagggttgcagtggtgtgagctgggcccactccctaaagcatggaccaccctgtctgagcactagcagctgctcagggcttgtcaaatctgcagcctcgctcccccaggcccccagtgtcacctactgcatttgatccacacagtgagagcctgtggggtcatcctgcactgtctgttctgcaggtgaggagcctggggcctggaggggcttggccgatcatggcctgggctgcagccctgcagggctgtctgctgcacaccctgtagcccacctgcgcacaaggcacttggggctgtccacgcctgctggaaaatgacactcagctggccctttaaatcagcttcctgcagagcc[137 bp omitted]cccgtctctactgaaaatgcaaaacttagctctgcatggcgggacgtgcctgtgatcccagctactcgggagactaagg[131 bp omitted]tgctggggccgcgtccccactaagggctgtgcatgtggcagcgctgatggggaggacgcatttgtccctgtgcactccggcctctgcacacgtgtctcgtgggcccctggaggctgggcccgcagccagtagcacccagcagcgtcctgcctgcttttcctgcctggtttatcttcccagccgcggacacagtgcctggtgttgacattcaggcttgcgtggaggtggggctggaagcagacagatcagtctggcagggtgggtctgctggggagaccacaagggtgggactgatgccggccacaaagcccgggctcccatgcactggtgcgaggtgcccacgagcccggcgggcttggatgccatgcttggagcccacaggtgctgggccacctgggcagggctgtgcaggcagtcacagaggctcatctggaaggggagccctctttccttgttcgtggagtggagtgtgcagtgggtcacgccggcctggccgggcacggccaggcgattaggaagccggcagcccgcgggtgatgcttccgaggcaccagtgactcagtccacaaacgtgggcgtaaaaggcctcatgattcaggtggagtgatggtgcgatgcgtggtgcagtgataagtcctcctgcccgacgccttatggatcatctgacatttccagaacgcagcctcttcattaccggtgcttgtaacgatgaattaaaaatccttttacacgaggcccgcttgtactgcttaatggggctttgcaaggaggcggcggttaattcctgctcgcccaaccgcccagccaccttcgcgggccacgggcaggctgcaggcatggggcactcactcctggttacccatccgtcagtttgtctccaggacttctccagccaccggctcagggctccaggcagtcctggtgagtcagggggctccggctggccgcccgcctgggccaagttatcaccacgttctcaaggccgtgctgctgagaagcttctcacctaccggctgggcaggttcctggcagcaggcaaaagcaccgggagctccctggaggatctgggaggtctgggaggggcttgggatggggggaggcgcctccagggcagcaggaggggtgggcagttgcaccagctctctccactgcccacagtcctgcctggaggggtagggctcggtcaggagggaggggctctctgctcctcaggggttggggttgtttgcgaaagcaggttggtggacagccactgcgcctcagtgtgtgacaggctgaggacacagcttcatgggtggtacctagcggtgaccacctgcttcctccaggccgtggtgctctgcagacctctgaagcccacccgcgtcgtcctcacagccctgtggcctccgaggaaggacaccgagccgggaacttcgaaccaaacaccagtgcctgggcccttccaggccccccacgggccgtagaccctgactccccggcacacactggcctgggccaggccagcactggatgtgggtcttcaaactgcggctcccaggaagggaggtgacggccaagaacgcctgcccgacctcctgtggccacagcgcgtggcgtgactggacctcgccttagtaggggtggctctgggcaacctcggccccaggcacagctcctgacaaatggtcccatgggtccgggggcacgcttttcacaacgtggagatgcagggtcatgggctgcctgctaccacgaggcggaaggggatggtgctgggcaccagcctgccccggggctgggtttctcctgggcctgggccgaggggtggaggcctgtgggtgacgtgttcaagacggctcagcaaccccacctgacagtgtccaggtggggcctctcccccacccccaggctccccagggagcacagcctccactcctacacactggctactctgccggagggggaggccgtgctggagtgatgcctggcgcgtgttgtgtgatgggagaattgggtatttacagtttaataacgagatctcgatgccgtcgatcggccctgctccaggcccttggcttatctggcttttgaacgtggtttatagagtggtgacggtgccgcttattaaatgcttagctgggcctggcgtgggtgtggcggccgccagggccccggtgctggctcgggcaggtgttgcagcgggagcctcaagggatgaaaggtggctctccggtgctccctcctcaccaaggaggcttctctcagggcttcttattaaaagccgatgtaaaggacctgcgcgatggctcacgcctgtaatcccagcactttaggaggtcaaggcgggaggatcccttgagctcaggagtttgagagcagcctggacaatatagcaagactccacctctacaaaagtcaaaaattagccaggcatgatggttgcacctgtggtcccagctactcaggaggctgaggtgggaggattgcttgagcccaggagttggagaccgcagtgagctatgatcgcgccgtgtgctccagcctgggtgacagagcacccaggctcaaaaaaaaaaagaaaaaatccttcactctaaccattctaaagtgtgccactctatgttttttagtacattctgagttgtgccaactatcacaccgtctaattccagaacagttcatcaccccatgaagaatgggccccattaccagtcgctcccatcccctaccctgtgcccacgagcccacttcctgtgtctgggggtggcctgccctgggggttgcagaacacggggtcacatggtctgcactcacctctgtgtccccagggcacatctctgtcgccacgtggttcctctggctgagcgacaccacgtggggctcttcagtgtctgtcccagcagtcagtgacacgcagggggacgggagaggactccccgggggctgatctgtcccagcagccagtgacatgcaggggggatgggagaggactccccagaggctgagcagcaggaggctgggtcagtgggtctggagggcttggccagggaggctgcgggctctgggctgtggaggggaaccctcactgggcagagcgcagggccactcccgcgatgcctcccttgaaggctgtgccgggaggggccggggactccgttccagggtccctagggaagctcgagccccatgcccctgcctgtgtccccatccccagaaatgcgtgtactgccggaagcggatgaagaaggtgtcaggtgcctgtatccagtgctcctacgagcactgctccacgtccttccacgtgacctgcgcccacgccgcaggcgtgctcatggagccggacgactggccctatgtggtctccatcacctgcctcaagcacaagtcggggggtcacgctgtgagtgcctgcccgcctccttgcccccagcccctggctcccgcccccaccgacacccgcgctgaccgccccccacaccctccgcaccctcccaggtccaactcctgagggccgtgtccctaggccaggtggtcatcaccaagaaccgcaacgggctgtactaccgctgtcgcgtcatcggtgccgcctcgcagacctgctacgaagtgaacttcgacgatggctcctacagcgacaacctgtaccctgagagcatcacggtgagctgtggggtggggcagggggcggggggaggctgggagcacagcgacaacctgtaccctgagagcatcacggtgagctgtgggggtgggcggggggaagctaggagtggcctgactccagatcccttcatggggtccccttgtcctcagggccccaggccccttcaggaaaagcaccgctcactgttcagcagaaagcgacccgcagccagggctctgcaccgccccgctaccccgggcccccgcagccagctttggggcttcaggcagagaacctcacttgccagcgcggagagggtctaaaacccagcgacagcccccagcgtagtgtggccaggacctcacctcccacctcttctccctgcagagtagggactgtgtccagctgggacccccttccgagggggagctggtggagctccggtggactgacggcaacctctacaaggccaagttcatctcctccgtcaccagccacatctaccaggtaagcgggggatctggcagccgcgccatgccttcaccaagctcttcttgtaggtgcggggacaggaggatcacacccctggcccaggtgcctttgcctggggcactggcgggtgtgggccatggttagtgaggcccgcaggacccagctgagccttggctcgcctgcctaagttagaagcacagggcttgtttgttttcaaagctaaaggggcctccactcgggtgacatttccctttgagacaccttctcaatttttcttaacataagttctccctttcaccgttttggagtgtacagctcagtacccctgggtttttttttttttaatcaaattggtagtgagtttcttctcatgactgtggaagaggaattatttaaaagtgtggaatcttagaccgggcacggtggctcacccctgtaatcccaacattttgggaggccgaggcaggtggatcacttgaggtcaggagttcaagaccagcctggccaacatggtgaaaccctgtctctactaaaaatacaaaaattagctgggcttagtgacaggcacctgtagtcccagctgctcgggaggctgaggcaggagaatcgcttgaacccgggaggcagagtttgcagtgagccgagatcacaccactgcactccacactccagcctgggtgacagagcgagactcagcctcaaaaaattaattaattaattaaatgaaataaaagcgtggaattttaggaggagagctgcccatatcccagcagctagaagcgtcgctcccaagcctggtgccgcacttcccttgagctcccctggctcgaggctcccgggaggaggcgacagcttgtctcttccagtcacatctgccccatttgaggagtggaaacgaagcctcactcagagtcacctcgggtcacgcggcgggtcagtcggtgacgtcctggccttagctcgcaccccgagccccaagttctttgtaaacatcggagttcagctctttaccacgtcggttaaggtgaaaaccctaacccctgcgatggtcccgaggccgcattaaggaaaggtcccgcccgcatctcccgccagacctgaatgaactgaaatgatcgagtgtcactgagtgcccaggaccacccctaccccccgccgtgcaggccggccccgcccggtcaccactctcggacctgtcactgagcatccaggacccccacccccggccgtgcaggccgaccccgcccagtcaccactctcaacctgtcactgagcatccaggaccgccttgccatgcaggccggccccgcccggtcactgctctcggacctgtcactgagcatccaggaccccccccgctccgccgtgcaggccggccccgcccagtcaccactctcgacctgtcactgagcatccaggacctccttgccatgcaggctggccccacccggtcaccactctcggaccttgcagggtcttccctgctccttgagaagggggtggtttcggggacaagccatccccatggccagccctgtgggagctaccaccaatctccagacactgtcacttctgctcagctccagccttccctggggggaggctcaggcagctccttggacttcctgattgtgttaggcttagaccaagggcaaggtcgatttgcaccccttagcccatcccaggcagcagcaaaagagaataatccctgctcagctcacctggcag[132 bp omitted]gagaccccccccccccccacaatctctacaaaaaattttaaaaattagctgggcatggtagtgtgcgcgtgtagtctcagctactcgggatgctgaggtgggaggatcgcttgaacccaggaggtcgaggatgcagtgagctgtaattgagccactgtactccagcttgggtgacactgagaccctgtctccaaaaaaaaaaaaaaaaaaaaaaacaaaaactctgctgggaagcattctggtgcatctagtacacggcaggatgggtggggtctgtgtgacagtgacaacaccctccgcctgccccgggagcctcagagtctggcccaggcaggtcggactggactccgaggaggggaggttgagccaggacctctagaacaccatggaagtttactccagagatcaggctgagcatgtgccagtctctctccctccctcaagaaacctatggagatgatagaaaacacacaaatagataaatagccatttataacgtacacagagcacaactgtggtggaaaatgacaagggagactcagggtgggtcttgacaacatcccacagaagaggcgctgacgcagcccccaccctggtggcgaaggaagtgctcccaggatcattgtcatgtcaccagagcccaggcagggccagcgtcaggggagctcacctcaaggaagccgagctaatgagacagtcagaaatgagatgatgccagccaggcgcgggggctcatgctgtgatcgcagcactgtgggaggctgaggtgggcagagcgcttgagcacaggggttcgagaccagcctgggcaacgcagcaaaaccctgtctctacaaaaaaacaaaattagctgggcatggtggcacgcacctttagtcccagctacttgggaagctgaggtgggaggatcacttgagcctgggaggttgaggattcagtgatccaagatcgcgccactgcactccaacccgggtgatgaaacaaagccctgtctcaaaaaaaaaaaaaaaaaaaagtcacatttccagagtgctcggggcgggggggcagaggctgtggaatcaggaatgggtggtatcggaagccagcaagccaccgtggagtgcgcgcctgcctgcgaggtggcggcaggacctcgatcacacaatcatgcaaacgcccgctgtgtggtggccaaggagatggggctggagctgcctgccccgaggccaagggcctggtcagcggggcgggtggctggggtgggcccaggtgacagcgaggccgagtggctgagacccccacatgccaaggccccaagagcctccccgcctgtccggaacacttggaacatgtttccctcgcacgtgacccctcgagatgcttctgagacgtgccgggcaagacgtcaccacagggagcccgggccgaggcgcacgcctctgatttcctgtagctgcaagtatatccagttttctcaaaatgttaaaaagcaaacgccgccttcagaactcgccctgtggagactcatagtgaaagcacgttccagggaggccactgggaggaaatcagcctgagtctccagtcagcccccagttcccaaatgacccaggcacagaagtttccctggagcccacttggacccggcagtgtgagcgccatcctcctaggcggttctgtgctcctgagaatctggggcggatctctgcagtcttcctgacccagaaacctgagccagtttccactgagtttctagaacgcgccttcccctcctggcaaggctgcttctgtgcctgactgaatcactgtgtgccacgcctgccagaagccgagaggccgagtcggggccggggagctggggaaaggcagcaggtgggccctgggactcctgcagtgggagctctaaaacccgctgctgcccgtggcaaagcggagcctccaaaacccgctgctgcccttggcaaagcggagcctccaaaacccgctgctgcccgtggcaaagcggagcctggccacgccgggggtggaaatcgctttccggggtgctggggctccgacactaggactccttcacccagactctcctcaccggacagacgctgggaaggggccttctcccggtggctttcctctacaaatgagatgggtaggacggggcagagggtggcacccatgtccttggttcccagcaggctcctccacacatccccgagagatgtgtgctgtcgtcccaggacacggcccagaggcaaccggccatctgagagtccacactgggcactcccagccctgcttctcccgccgcctgcgccggccaagaggcatgtggaacccacagcagacacttgctccagggcctacgtctgtctccatccccacccatccctggaggagtcacagggaccggcaggcttggctgccccaaggcagggtctgtgctcccttggagagggaggtgctgcgatcccgggcccccccgctgcacactacgtggggcgtctagccccagacacacttccgcgatggtcttactgtgtgacttttatacacttccgtcatggtcttagtgtgtgacttttgtacgcttctgtgacagtcttatgtgtgcattttgttcattttgagacggggtcttgatctgtcacccagcctggagtgcagtgacataattagagctcactacagcctccacctcagcctcctgggtagctgggaccacaggcacatgccaccatgcctggcttgttttgagtttttaaatgtgaaaagcgagccctctgatatgggaaccttctccccctggagcagaacggcagtcaggcccagggagtgaccccagcacctttcctggcttgggaacacggcgcccatcgcagttatgaggtgggcctggagacacgcccctccctggcacgcccttcatgggacagtgttgtgttgccagagggcccctgagagagtctccgcgagcctgagctggcaccaagcttaacgaggaggaagcggggtgctcccagtgcccctcaccagtcaggcatctgccacctggaacaaggcaccagctggggaggctggaagggggtgatttttctctgagttgaagggaagaggtgactgagctgttttcagagggccacacataagccagggaccctgtccttcaccttctggttgggggctcctgagctcaggcccctgagtccgcctgtccggcctcccctgcctcccaggccctgttagggcactgcgcctcctgcctggctctgtgtccaccagtgactctgtcaccttgtcctggggctgtgtcttcatggagacagatgtcttttgagctgggaggaggtgaggggtgagtgttctgtctccatgtggaagctgcggggccctgcctctgccccaggctgtcccgtcctccgtcatccttgccccgtggtacgggaccctcagcctgatccttgtttgctgcaggcggtgtcagaggtggacatgagcttcagcttggctgcatgtggcctctagcgggccccatgcacccaagggggctggcctcccagctcttgaggccgtggcctgcctggagcacctgccatcctggcagtgccaggcccctgagagccacatccccctgcaggtggagtttgaggacgggtcccagctgacggtgaagcgtggggacatcttcaccctggaggaggagctgcccaagagggtccgctctcggctggtgagtgcgcgaggctggcctggtggctccgggtgactcagggagcccgtctgggacgaggcagggcacagactgcgtcttccaatggcgtggaccaccccctcctcttgcacctctgctggaagggggtcccggccgccccagcacagctggtccatgggctcctggcaggagacccttcctttgccttgactcctggtgccgcagctcctgggcgatgccgttaatgtggggagggagggttggagaagccccgcccctccccttatcacgaatgcagaacagaccctcccagccccctgtgccctgcaggacccgcgctgccccaccctgcacagggcggcctctgaaccatcacaggttttggggtacaggcgaagtacgggcaccccagttgtcggcttaaaaaagcttttcctgaggtttttccttattaaacgggagcctgagtcctggaggcagcggaggcagctccagctttcgctcccccagccctcatgggcttcctttattctctttctaatcgagaggcgagaggcgaggtgttgaggggcagagcccgtgggggaggttcctggtcctggccacagctgctcagccgcagaggggtccctcggaaaacagatgggagctgccagatggacggtcccagccccagccagggtgcccaccccactagggggccagaggctggggccgagtgcagggcccctctgctggcaggatcaggggtttacaaacacgaaaacaggagcctgctgagcagcccccacagcaatcagggctctgtgtccagccagctcctctcagaggccatagacagtggctggggccgcacagagtgtctccaccgtgctaaccactgtgcttccgctctcccgcagtcactgagcacgggggcaccgcaggagcccgccttctcgggggaggaggccaaggccgccaagcgcccgcgtgtgggcaccccgcttgccacggaggactccgggcggagccaggactacgtggccttcgtggagagcctcctgcaggtgcagggccggcccggagcccccttctaggacagctggccgctcaggcgaccctcagcccggcggggaggccatggcatgccccgggcgttcgcttgctgtgaattcctgtcctcgtgtccccgacccccgagaggccacctccaagccgcgggtgccccctagggcgacaggagccagcgggacgccgcacgcggccccagactcagggagcagggccaggcgggctcgggggccggccaggggagcaccccactcaactactcagaattttaaaccatgtaagctctcttcttctcgaaaaggtgctactgcaatgccctactgagcaacctttgagattgtcacttctgtacataaaccacctttgtgaggctctttctataaatacatattgtttaaaaaaaagcaagaaaaaaaggaaaacaaaggaaaatatccccaaagttgttttctagatttgtggctttaagaaaaacaaaacaaaacaaacacattgtttttctcagaaccaggattctctgagaggtcagagcatctcgctgtttttttgttgttgttttaaaatattatgatttggctacagaccaggcagggaaagagacccggtaattggagggtgagcctcggggggggggcaggacgccccggtttcggcacagcccggtcactcacggcctcgctctcgcctcaccccggctcctgggctttgatggtctggtgccagtgcctgtgcccactctgtgcctgctgggaggaggcccaggctctctggtggccgcccctgtgcacctggccaggggaagcccgggggtctggggcctccctccgtctgcgcccacctttgcagaataaactctctcctggggtttgtctatctttgtttctctcacctgagagaaacgcaggtgttccagaggcttccttgcagacaaagcacccctgcacctcctatggctcaggatgagggaggcccccaggcccttctggttggtagtgagtgtggacagcttcccagctcttcgggtacaaccctgagcaggtcgggggacacagggccgaggcaggccttcggggcccctttcgcctgcttccgggcagggacgaggcctggtgtcctcgctccacccacccacgctgctgtcacctgaggggaatctgcttcttaggagtgggttgagctgatagagaaaaaacggccttcagcccaggctgggaagcgccttctccaggtgcctctccctcaccagctctgcacccctctggggagccttccccaccttagctgtctcctgccccagggagggatggaggagataatttgcttatattaaaaacaaaaaatggctgaggcaggagtttgggaccagcctgggctatatagcaagaccccatcactacaaattttttacaaattagctaggtgtggtggtgcgcacctgtggtcccagctactcgggaggctgtggtgggaggattgcttgagtccaggaggttgaggctgcagtcagctcagattgcaccactgcactccagcctgggcaacagagcgagaccctgtctccaaaaaaaaaaaaaagcaatgtttatattataaaagagtgtcctaacagtccccgggctagagaggactaaggaaaacagagagagtgttacgcaggagcaagcctttcatttccttggtgggggaggggggcggttgccctggagagggccggggtcggggaggttggggggtgtcagccaaaacgtggaggtgtccctctgcacgcagccctcgcccggcgtggcgctgacactgtattcttatgttgtttgaaaatgctatttatattgtaaagaagcgggcgggtgcccctgctgcccttgtcccttgggggtcacacccatcccctggtgggctcctgggcggcctgcgcagatgggccacagaagggcaggccggagctgcacactctccccacgaaggtatctctgtgtcttactctgtgcaaagacgcggcaaaacccagtgccctggtttttccccacccgagatgaaggatacgctgtattttttgcctaatgtccctgcctctaggttcataatgaattaaaggttcatgaacgctgcgaaaccccgttccatgccccggcaagtgtcttcatttctgagcctgtgctagggggactgatgttggggcctccctggggtggggctgcctgcgccccgttctcccgggagaaggtttgcttccagagctggatgtccctcccctcccactctccagggtccccaacacacccccacacacccaggggcagctgtcatgcccctcatgctgtggccaggctgggtggctggggcagcggaccccatgattccccctcagttctctggaggcctggccctggcctcactcgtcccagccagcagctgccctgtccctgtcccccatccggttctggttacatctgagccccgagagcattgcttgtggtggtggtggctggcagacgtgctaggcgctggggctcacggccctggatggccactgggacccagcagtcctggcctgggtcactcagtgcccagccccaccaggcctggagtcggcagaggggacacgggagacctgagcctccctcagggaggtgaccctcctgtgcctggtgtgcggcaagaacatgaagaggcccctgtggctggagcagagggaggcaggggagagggggaggaggggaggcagggtgtgcaggcccttgtgggtctcgggaaggacttgggctttgaccctgagggaggtgggagccatggaggggtgtgggcaggggagggatgggccctgactcaggtgctcacaggcgccctctggtgattgctgtggggaggagacggggtaagggcagaagctagggaccagggcaggggtcaggtgtagtgagaagtgggtggattctggatgcattttcagtgcagagccaataggattcgcagatcacccgagcccctggaaggaggcgttgagctgggagggggttggatttgaacaccagacgtccaggtgaaggtgctgggtctggggaggccgccccaaggcaggtggtcaggggccgtcagctggcaggtgttggaactagaggatgaagtcacctgcagggagtgggtggaggtggggtgggacccaggactgggccctgggtgtctgtggtgggacgggggctgggacacccggagaaacccaggcccagcagccagggctcggggggacgcggccaggccatccctccctgggccccggcgttccctctgcagaaggagtgtccacctgcctgctgtgccgagggcttgtgtcctgaacagagggtgcccttgacaaaaaagcttcatccacctactgcccccagcaccgactctcctttctggggccctctcgcctccagcatcctctcaacaccaccaggactcagttcccctgtgtgctgcaggtggggaggagggatccagggtggggtgaagcccgtggccacaggaggcttggatgctccacctgctgcgatttcccgacaaagactgtgtccctcttttctccatctcgaaagccttccctgtgtgcggggacagacacagcctgaaaccaaagcctctggggtgcccccccgcccgccctaggccctgtgaggtcagcgtccctgggcctccccaagctggcagaggggccgtggcaggagcaggtggtgcctgcagcgtcctttccattgttctccaaaacgctctaaaacgggaaggctatttgggacaggctgttgctgtctgccgagcagagtaaagatgagtggataggtccccaaaagtgtcaccgtgcggagccgatgaggtctgcactcgggccggggtgggtgccccgatgccgaggtctcgtatctcggggcagtgtgtgagactccgtaatcagcacctgagtttggttcatttattccagctgcaatatttttatgcaacctctgtgccaggctctggggacactgctgaggaaaagggagaaaaaaacaaaaatacatctttaatgcatgctctgaaagacaagaacggggtcagagatggagggtaagtggtggtcggtcacagaccaccagaagggtgtcagtggacaccctttttattaaagagggactcttaaacagatatgaccccccgatgggacggcagatcagagaatcaggctgtgggtacattgtgttgagagcaggcaccttctagggcaaggcctggcaacctacagccctccgaccaaatgcagcccgccacctgtttttgtcaataaagttttgttggcacatggacatgcccattcatttacatatgacagctggcgccccgacaacagcagacctgaagagtcactgcagagcccacctggcctgcaaagcccaatgtatttagaatctggccctttatgggaaagaatgtgctcagccctgacttagaagaagtgggtggtggcagcctccaccctttctctatgcctgcaacaaaatgttctcccatagggacagcccctcagtgcccaggtccaccttggctctcaaaggcttccagttagatggacagtgggcagccaactgcccccgctgccacccgcaggagcgggtggaaaaaggaggctttgaccagggactttgattcatctgtccatctgtccgacccactgggggtgctctgccctctacccttgggccacctgctgcccaagtgctggggtcggggagagcctgacacactcagcctccgacccctgcagctgccccccaccaaccccaccattcacggattgggctccctccccttctgcaatggagagttctggctcccactccaccacggtcaagattcacggctcccatgacggtgctaagatcccgatgtgtctccctctctccctgtggccaccgccccgactcctcccacaacctcaaattgtcccctggccccatgaggcagctctggaactcaagagtcacagcctggtcatgatcatcagggagagaagctcccagggactcccagggccccagagacgaggcacagaacacaaggaagctgggggacacgcctggggccttggcaccagcccggggagggttatttacggattagatttactcagcgctgctgctctgttaatggagaatataaaaattatttgctgctgcaggcagtgtgaggggtgacagcagccaggaggcgggcggaagagtgggtggctcagggcatccgtgcctcccagctaactcggtgacagggacaaatgcctcccttccctgcagcttccagacggaggagggggtccttgtggccacgacagcctccacccccaccagccccagcagctgctttagaaacacaaagccagccatgtacggtggctcacgcctataatcccagcactttgggaggctgaggtgggcggatcacctgagttcaggagtttgagaccagcctgggcaacatggagaaaccccgtttctactaaaaatacaaaaaattagccaggcatggtggtgagtgcctgtaatcccagctactcgggaggctgaggcaggagaatcactagaagccaggaggcagaggttgcagtgagccaagcgcgtgccatttcactccagcctggacaacaagagcaagactccatctcaaaaaaaaaaaaaaaaaaaatagaaaaaaagaaacacaaagcccaaagtatgggtgccaaacgggaagtttgaaaagagtctctgtgtcccccaccccttcccagggcccctgctggttccagaacatctgttgccctctcacccccgtactcatcagagtgctgcaaactggggagcttcaacagagaattatcctctcccagccctggaggccagaagtctgagatcaaggtgtcagcagggccacgccccctcccaagagtccagggggatccttccccacctcttccagcttctggtggccccaggtgttcctgggcttgtggccaaatcactgcagtctctgcctctggggttacacacccgtctcctcctcttctccatgtctgctgtgtgtgtctaatataaggacacttgtaatgggacttagggtccacccacatagtccaggatgatctccaaatctcaagatccttaattacatctgcacaggcactcttcaaggaaaaggtcacagcccagggttctggagaagaagatgtggacagatctttttgggggccattagtcaagccaccaccgcaatgtctgtttccccatcacagatcaatagccccatccctaattgcctggtcctgtgactgccacctcccacctcccctgagagggtaaggatatggtcttggtccccaggaagtggcagggggttctgtgagtcctggtgttggtggaagtcaggctctggaaggaccccggaggcgaaggctctggagggaggacccgacggaaggacaggcatgaacttggcatgtggattccccatgggtgggtctgagagccatggaggatgatgtagcaactagtacagatggcccaggacttagcccagggtggtcatggctgtctcccacactcaccaaccgtgatcttatgtccagagttggttccttctggtgggtgcat[136 bp omitted]cccatctctgctaaaaaatacaaaaaaaattagccaggtgtggtggcaggcgcctgtagtcccagctgctcgggaggctgaggcaggagaatggtgtgaacctgggaggtggatcttgcagtaagccgagatcgcaccactgcactccagcctgggcgacagagcaagactgtgtctcaaaaaaaataataaaattaaaaaatgttaaaataagaatgaagccgcggaccttcacagtgagtgttacagctcttaaaggtgtcttggacccaaagagtgaggagcaagatttattgtgaagagcaaaagaacaaagcttccacagcgtggaaggggacccgagtgggttgccgctgctgcctgggctggccaattttttcccttatttgtccctgcccatgtcctgctgattggtccattttacagagtgctgattgatccattttacagagtgctgattggtgcattttacaaacctctagctacagagcgctgattggtgcatttttacagagtgctgattggtgcattttacaaacctcttgtaagacagaaaagttctccaagttcccactcaacccaggaagtccagctgacttcatctctcaatcccccatctaaacaggacaccccaactgctgttgggaattgggcgatgaccgctctagctacttcctgctggataggggcgaagaaggggccctgcagttgtggtgtcctccagaggggaactctttaggccagtgaaagggccagcaggttggtccaggggtcctcagtagaagttgttagttgagctcatttggggttccatttgtaagatcatctgtagcttgatggcctcaatcctagaggaaacaaatttgacaaggaggttaaaaatacagggcctgaaggcaagtaatagcaagatggctgtcacgggacctagaaaggggaaaagccatgtcgcccaattccagaggttgttataagagtttgaaaggcattgtctgatttcagaagccttttcctgtaaacgccaggcggcgtctcctattatccctgactgattagcggaaaaacaatgctcttcccctaagaaggtgcaaaatcctcctttctcagcagtgaggaggtctagaccttgacggttttggagtcactgatgccaaagagtctatttgggattgtagagtaaggatagattttgttatttcttgcaaactgtctgagaaatcctttgagagtgtgtggtagtaggctagtgaagtggacaaacctgctattctgattcctgtagcagtggccattcctaaccctgtaagtaggggtattagttgtatggctctgtgctgatggagttgagctttgaggggcactgatagggtctgatttccacaagattagaagttaggataatacatgttacactgttgttaacttttagcaaactttacttttgttgaaaaccttgtaagtctgggatttcaattattctttgctattaataagacctcgttcagtccatattaacttagaattggtatagatggctccttcctgattctgtaagtactttaaggtttggctgagtgcaaacagctctcacgtttgagcagaccaattattaggcaattttaatacccattgtatctttttcccttaatcaccggagaggaaccatctattgtcctgtcctgaagggagtaccttctaggtctggtcagacctttgtatggtaattaggatttagatcccctattaggaaacctgctgggttaaggatttttgataggaaagctacaggttgtcagtggcctcagtgctttcaggctacgcccctgtttacgctgacaacaaggtggtattggagtgttacagggtcatggagaagacctccaattaacaattgtaggttttaaatttacccaggcttttaaaggcatagggtacactgtttttttctttactacttctatctctttctttctctctttccttctctctttgactttctgtctctctctctctttctctctctctctgactccctctttgtctctgtctcttcctctctttctctctttccttctttctttgactttctgtctttcccctctctctctctctctttctctctttgactttctgtctctctctttctgtctctctctgactccctctttgtctctgtctcttcctctctttctctctttccttctttctttgactttctgtctttcccctctctctctttctttctttctttgactttctgtctctctctctttcctctctgctggtctttccctgcctctccttcccctttttgatagcttcagcagtgtaagactgccacctccttggggtttttgcactgcatgcaatagctccatgatttccttgtggtatttaatgggggttcccccagaggttaggaactccttttctttccatattgcagcatgggcatgtaggattagataaacatactcgctatctgtatacacgttctttttccctttcccagttctaaggctcagataagtgccactagttctgctaactgagcgctggtccttgggggaagaggcttactttcaagtactgttacataactatggcataacctgcccttcatatcccattctccacaagtgaacttccattggtatatggattaaggtcaggattagctaagcggacttctaagagatcctctcaggcggcctaagtctggactataatttgttggcagtcatgcttgattggtttcccatcctctgggagaaaagtggcaggattgaggggtgcacacatgcgtatttgaaggaccattccctcaagtaacacctggtatctaagcaggcggttgtctaatagccataaacttcctttggcacctagtatgccatttacatcatgagtagtctggacagtgagatcctttccttatattattttgatagcttctgatactaagatggccatcgccgcaactacctgtaagcagtgaggccaggcttttgctactacgtcaatttccttaggtacaccactagttgtagggttgtctcacgagtctgagtaatgactccaagagctattcctgctctctgtgtgacgtataaagagaggtttgttcctgtgggaaggcttaaggctggagcttgtagtagggcctgctttaaggttttgaaggctgtttctgcctctggttcccattctactagatgagtatttgccctctgggtctccattctactagatgagtatttgccctctgggtctccttagagtgtatctcgctgtatctggggatccatagtcggcaaaagccagtgattccaaggaacccccacaactgttttaatgtcttagggcgaggataagccagtataggctgtattcattccttgctgagggccctggttcctctggccaagattaggcctagatatttgacttgtaggcagagctgggcctttgatttagacatcttgtacccttgattagctagaaaattcaagagatcgagagtagtctgctggcatgagtcttccaaactggtagccaaaagtaaatcatccacatattgaaggaccagagtgcctggacttaagaagtggcctaaatcttgggccagtacctgaccaaacagatgagggctatccctaaacccttggggcaagaccttccatgtaagttgggacctgtggtctgtgggatcctcaaaagcaaagagaaactgggagtcagagtgcaggggaatacagaagaagacatccttgaggtccagaacagtgaaccattctgcttcctctggtattcaagagagcagggtataggggttgggtacaactggatatagaggaattactgcctcattgattagtctaagatcttgcactagcctccactgaccatttggtttttgtactcctagaattggggtgttgcagggactactgcattttcttagtaagccttgagcttttaaatgtctgacagtatcctgtaatcctttatgagcttcaggccctaagggatattgcctttgataaggaaaattgatgggatcttttagcctgatttggatggggcgggcattttttgcccttccaaattgtccttccaatgcccagacttcagggttgattccctcctcaagtaggggacaacaaatgggtaatttgttccccatattcaagtaaataatagctccagctttggctaatatgtccctccctaataagggtgtgggactttcaggcataacaagaaaggcatgtgaatagagcaaagtctcccaattacaactgaggaggtgggagaaatacctggttacaggctgtcccaggattcctcggatggtaatggaccttgaggacagctgtctggggcaggagattaacactgagaaggctgcaccagtatccaggaggaagtcaatttcctggccctcattggttaatcatacccggggctcagtgagagtgatgacatgagctggcgcttgccccaggcaccctcaatcctgttgttggatcatctggttgggggcttctggcccacagagcctttgccctctggggcagtgcaccttccagtgattgcctcagcatagtggacatgggctagggggcagcttgtttctcattggacaatcttttttaaagtgtccttgcaaaccacactgataacaagccctactaggtgattggcctgttccattttctgtcctctctgaaccaccaaggtttgtttgtctgagggccatgactaaggctgtggccttcctctgatctcgcttttccttttcggcctgtttctcttggtccctattatagaacaccgaggttgcccggtttaacaatgcatccagattttgttcagggcccagggctcacttttggagctttctcctgatatcttcactgattgggtaataaagttatgtttgaggatcagttgaccctcgagagagtcaggtgacaggggagtatattttcttaaggcctcctatagccactcgaggaaggcggtaggattttcttcctttccctgagttgtggtggacatcattgaataattcatggggtttttcctaattctccttagtccttctagaacacaggtcaacagatgtttgcgactccagtccccatgatctgagtcgaggtcccagtggggatccatactggggatggcttgctgaccagtagggaatttgtccctttcttcagctgtcatcctatcatttacttgattaagataaaaggtatctccaaactcttgggctgcagctaaagctccattcttttcattaaagaccagggtttgatctaacaatagcatgacatctctccaagtgaggtcaaaggtttgccctagaccctataggacatctgtatacctatcaggatcatctgaaaacttccccaggtctaccttgatctgctttaaatcgagagggagaagggacatgtacccagattgggccaaaatccctacccctatagcttgaaggggacataaatgatagcccagggggttttgtggtcccttggagatttctttgcttgtttccttctgggtgggggagattagacgaggcttatccttaataggaatgggagctgtaggaaggctaggatatagaggtaagctgagagctcctcctgtgggatgtaaattgcaagctttgcatagttgtggattctccttcaatgaaaagaaagcttggacataaggtatttcactccatttgccttccctcttacagaaaaagtcaagctgcatgatagtattgtaatttatacttccttcaggtggccatttttccccatcagagagagaatattggggcaaggccatagtgcagaaaaaaaaaatgagccacctctttttcagggtttctgggtcaaattggtcccagtggcttaggatgcatttcaaggttgagcctgttgatgcctgagtgtttcccatgtgaaagaaaaactgctcgcagttttggtttgttttcccccctcccccacccaagaacctgcaacagtccctggaccctgctgatcgtaatagttgcgctcaccgaagcagcagcagaaacactagttttcctcctagaccacaaagaggactgaggaaggtcagatttagtggcccttactgatgcattctcggaaacatgcatccttgcctttcctcttagaccacaaagaagactgagaaaaaacagatttagtggcccttaccaacacattctcgaagacctgttagagtcctaagcattttctcctgttagtattgggaccttacccttgttctataaagatgttatgtctcaaaatggagtgaagggccataccctgagggagggaagggatctctagagtgatgccttttgtcctcacttctcatcatgtgaataggaaggatatcatttctgaggctccccatatcctagctttgggaatagcctttgttaggcctgctagtctgaggagggatcctaaaattccagatagtctccccactgacagggctttgggcaaagattgtctttctgattggtgagcccagatgcctaaagaaaggaacagagtcctgaaatgtatactagaagtcgttcttataggagaaactagaaaagcaccagagacagggagtggtttttagaaacaggactagcctcggagaggagaggtgggaggaagtatgtctgacaggcattaggacccaggaggcaagggtcaggatagataggataaatgggcaagtctcgcttgggtgacgtgactttgagagttccgctcatggctgcagggtcaaccaactttttgtcagggccctggagctaaatggctttcctctctgttgacacttggctcagtccggaagtacaggaaaagtggaagctggttccaggcaaaccaacgctcccaactccaaagagttggggattgttagagagccctttcccagaaagcccgacaccagtgtctttagtctggtggccacgctagttgcttttaactggccgacaagtgcccggtgtttagcccctgaattctaaggaaaaataggacagaatagcaagcaaaatgggtccgatggtactcaccaaaaggcgatatcccagacaagcccccaagatgtgtccagagttggttccttccagtgggttcgtggtctcgctgacttcaagaatgaagccgcggaccttcgtggtgagtgttacagctcttaaaggtggcacggacccaaagagtgagcagcagcaagatttattatgaagaccaaaagaacaaagcttccacagcgtggaaggggacccgagcgggttgctgctgctggctggggcggccagcttttattcccttatttgtccctgcccatgtcctgctgattggtccattttacagagtgctgattggtccattttacagagcactgattggtgcattttacaaacctcttgtaagacagaaaagttctccaagtccccgctcgacccaggaagtccagttggcctcacctctcagtcttatcaattctgccagctgctactgagcccttgcactgtgctagtttttcccaagcccacacacacactggggagccagacactgaggatacagcaagttcttgccccacaaagcccatgccctttagaggagacagatgccagcatcaacattaccaggtgttaagaaagtacctgggaatagtctgagtccttcaaaaagttaaacacagaccaggcttggtggctcatgcctataatcccagcactttaggagtccgaggcgggtggatcacctgaggtcaggagttcatgaccagcctggccaacatggtaaaactccatctctactaaaaatacaaaaattagctgggggtggtggtgagctcctgttatcccagctactcgggaggctgaggcaggagaatcaattgaacccaggagggttgcagtgagctgagaccgcaccattgcactccagcctgggcgacaagagtgaaactccatttcaaataaaaagttaaacacagagtcactgtatgacccaggaatctgacttccaggatacaccaaaagaattggaagcagagactcagatgtttgcacaccatggtcatagcaacatgattcacagtggccaaaaggtggaaacaatccaagtgtctgttgtttgatggatgggtaaacacaatgtgatccatccatacaatggaatatcactcagccattaaaaggaatgggggtctgacacaggctacagtagtgtggatgaaccttggcatcatgctcagtgaaagaagccagacacaaaaggccacacagtgtgtgatcccatatctatgaaatgtccaggacaggtcaatctacagagacaggaaggggattgtaggttgccagcagctggggccaggggaatgaggagtggctatttaatgggcatagggtcttctttgggggtatttgggaattaaagagaattggtgactgcacagcactgagtgtgtcaaatgtcactgaattgttcactttcaaatggctaactttatgtgaatctcacctcaatgaaaaagaaatacgggaaggatagacaagaaactaaggatgttggttacctacaggggcaggtgggaaattatttaaaagaattagggcagtaggcaaggtggctcatgcctgtaatctcagcactttaggaggccaaggtgggaggattgcttgaggccaggatttcgagaccagtctaggcaacatagcaggaccctatctctgaaaaaaaaattgtttttaattagccagacgtggtggtgcacacctgtagtcccagctactcaggaagctgaggtagggggatcatttgagcctaggaggtcagggatgcaatgactcgtgattgtgctactgcactccagcctgtgtgacagagccagatcccatctcttaaaaaaaaaaaaaaaaaaaaaaaaggctaggtgcggaagcttatgcctgtaatcccagcactttgggggcca[133 bp omitted]gaggcaggagaatggcgtgaacccgggaggcggagcttgcagtgagccgagatcgcgccactgcactccagcctgggtaacagagggagactctgttgcaaaaaaggaaaagaaaaaaaaaaaagaggctggaagtggtatgggaaaaagagtagcaggaatgaagagggagtgcccactctctgagaaccatttggtatagctctgactgaaaaatcatagtcatgttatacacactttaaaagataactgattaaaatcaaggatatgatgtgtactccaaatggaaaacaaatagtaaaatataaactcagctgcaccacaaatgaaaatcaaccacactgaagagccaggggaagaatggagttgatctcagtaaatttgggaaacaatgtttccactggatactgttaggctaaaaatgaaaatacctatacaccaacactatactctagttcaaaaatctagttctcatggcttagccatctgtacctactatatgtgaatattgcaattgagcaaatgagtgaattaattgtagatgagctaggtttctctctgtcagcgaaaaaagttacgtcaagggtaaaggaagcggctagaatgaacattgtgctggttggaatcagaagtgtcagtataggctgggcgcagtggctcatgcctgtaatcccagcactttgggaggccaaggtgggtggatcatgacgtcaggagatcgagaccatcctggctaacacagtgaaaccctgtctctactaaaaacaaaaaaaaaattagctgggcgtggttgtgggcgcctgtagtcccagctactcgggaggctgaggcaggaaaatggcatgaacccaggaggcagagcttgcagtgagccgagattgcgccactgcactccagcctgggtgacatagcgagactccgtctcaaaaaaaaaaaaaaaaagtgtcagtatcaatccatgattttctaatatatatatatagacagatgttatagaaatatatagtcagtacatatagatgcagaaataaatatgtaagtatatatatttatattatgaatacaggtgaaagggctcaaacttgtaatcccagctatttgggagaccagggtggcttggggagaatcgcttgaggctaggagttcaagaccagcctggacaacatagcacagccccatccctacaaaaagaaaaatgttaagaagaaataaataaagatgtgtgtacacatggctaatctgataccccaatagcagtgagcatactagcaccccgatctaaataccattctccaataaaaggaaccaggggaggaatcactgattttatgactgggacagagaaaacacaagacaaggtacaggcacataccgctgtgcccagctaattttttattttttttgtagagataggggtctcactttgtcgcccaggctggtcttaaagtcctgggctcaagcgatcctcccgccttggcctcccaaagttggccatacccagcctacatgaatgattcgatgggggtctgggctcggtgactcatgcctgtaatgccagcactgtgggaggctgaggtgggcagatcacctgaggtcaggagttcgaaaccagcctggccaacatcgcaaaaacccatctctactaaaaatacaaaaattagctgggcgtggtggtgggcacctgtaatccaagctactcgggaggctgaggcaggagaatcacatgaacccaggaggtgagccgagatcatgccactacactctagcctgagcaatacagcaagactccatctcaacaacaaaaaaaaaaaaaaaaaagagagagagagagagagaaagaaaaacagaaaacacaagataaacctgaagcatcttgtgttcccagaaaataaggaaatgctcaaaaaagggtatagatatatagaaaggacaccagacccaaccgaagcagctcccagtggctgaagctgaaacaatttgaacaataaaattagtgacagtgtgggattatcacctagagaataaaataaatatccaaactgctataagtaattgaataaatacctaaatggagggagaagggacagatcttccttacagatgagtcacattacacgtaagagggagaagtaatggcttagtccctttgtgccactacaagagaatatcatggactgggtaatttacaaagatcatagatttatttctcgtggttctggaggctggaaagtccaagatcaaggctccagcctctggtgaaggctgctctcagcttccagaatgatgtcttgaatgccaccttctcacatgtcagaaggcaggatgggaaaggagtcaaaatctccaggaaaccttttataatggcacgaatcctaaacacctcccccaaaggccccatctcccaacactgttgcattggagaatcagtttccaacacatgactttggggggacccattcagaccatagcaaagagaaaggagtttacattcagtcactcagaaaacaccttcactttcctggtgttatcccaggagcttgggccacactgggcaaatatggggaaaaaaaagaaaaatccctgcccacagcagctcacagcccctcggggagacggatgagataaataaccaaattggggagcaggttagaaggttgtacatgctatgcgataaaagaagaaggaagaagaaggaggaggagagaaaggaggaggaggaaagaagaaaaagaaggaaaaagaagaaagaagaaaactaacggtgatgggaacaactgtattaggttggtgcaaaagtcattgcagcacacaatgacttttgcactaagctaaatatataggttgttcagggtcccactgagaaggtgacatttgagcagagacctgaagggagagagtgagtcaagtgtatatttggaggacgagagctccaggcagagtgcacagcccatgcaaaggtcctggggcaggactgtgcctggtgtgctggaggaacagtgaggagggccctgtggctgcagcagagtgagccaggggaagagaggaaggaggggagggcagcaaggtgatgaacatgtcatgcaaggccttgtggaccttaggctgtgaccctgaggaaggtgggagccatggagggctgtgggcagaggagggacaggacctgactcaggtgctcacaggcgccctctactggctgctgcagggaggacaggctgtgggttggtggcggtggggcagtgaggacgggaacaggtggaccagtgcagagaggactgggctggtgcagggtggaggcagaggagaaga[137 bp omitted]acatggtgaaaccccatctctactaaaaatacaaaaattagccaggcgtggtggtgggcgcctgtaatctcagttacttgggaggctgaggctggagaatcgctggaatccaggaggtggaggttgtagtgagctgagatcgcaccactgcactccagcctgggagacagagttagacctctaactgggaactgacttgttcccagtggctcccagttatgggtgagccacagcaaagccggcttctctgtgcatgttagcatctgcgtgtttctctagaacaatttcctgaagaaacaaaaggggagattgccaaatggaagtatctgtaattttattttgtttatttatttttttttctgagagtctcactttgttgctcaggctggagagcagtagcgtgatcaggagttcctgcagcctcaaccttctgggctcaagcaatcctcccacctcaccctcccaagtaattgagactacaggcagagccaccacacccagctaatttttaaattttttgtacagatggggggtctcactatgttgcccaggctggtcttgaactcctgggctcaagcaatcctctcacctcagcctctcaaagcactgggattacagcacaagccacagtgcctggcctgtaattttacttctaatcctgcagccaggtcaccccaaatgccttgtgcacccccgatgtgtggtaaaggagggtgtgcacttcccgctatctacccagatgtaagctgttaccacgtttttgtgatctgtttgataaatcaaaagtgatatctgattatggcttaaacattcattcctcttagaacgagcgaggttgagtatactctcattggattaaaagccttttgtcagaactgtcttgaaacatactattttttaaattccacgatggccatttcccgtcagtgagagggttgatttgatgtttaatcttttgcgtttctacatccatctagctcagcgtcagttgctgagatctgggtcaggggtcacacccagctttttcttctcttacgtttgatgttgataaatgagaaaaaccaggtcaggtgtgctggctcatgcctggcattccaacggttgaggaagctgaggcgggaggatcacttgaggccaagagtttaagaccagcctgggcaacagagtaagacttcgtctctaccaaaaaatcaaaaagtgagctgggcgtggtggtgggcacctgtagtctcagctactcaggaggctgagataagaggatcacttgagcccaggagtttgaggctgcagtgagctacgatcacaccactgcactccagcctgggcgaaagaatgagaccctgtctttaaaaaaaaaaaaaaaaaaaggcctcatgtcgtggcacatgcctgtaatcccagcactttgggacgccaaagtgggcagatcgcctgaggtcaggggttcaaaaccagcctgaccaacatagtaaaaccctgtctctactaaaaatacaaaattagccgggtgtggtggcacatgcctgtaatcccagctacttgggaggctgaggcaggagaatcgcttgaacctgggaggcagatgttgcagtgagcccagattgcaccactgcaccactgcactccagcctgggcaacaagagtga[225 bp omitted]gaggcaggagaatagcttgaacccaggaggtggaggttgcaatgagccaagatcacgccactgcactccagcctggatgacagagtgagactccgtctccaaaaaaaaagagagtgatggggctcacacctgtaaccccaatacttcacagagctgaggagggaggatcacttgaagtcaggaggttgaggtcagcctgggcagcatagcaagactgtctgtactaaattttttttaattagctgagcgtgatggtgcatgcctgagtcccagctacttgggaggctgaggcgggaggatcgcttgagcccaggagttcaaggctgcagtgagctatgatcacaccactgcactccagcctgggtgacagagcaagatcctgtcttaaaataaataaaataaaaattttctaaatcctgcaaataatcttatcggaagcatttagatcgaatttttaaatatactccacagtgaatcatccatttctgtctccaacaggaaaagaaaatcatgatgaatcagcgaaaggtcacacccttggtgactgagccatttgtgcaaaagcttcattcttttccagaaaccccagtttgtcctcagagttaagactgtcagctccaaagggatggccccaggctgtgctagtaactgaaaacctccccacgacacaagcctgaaataaccgctgtgggtgtgggtggtgttattgatgtcacaaagaaatatcatctcaaaactcatgtttcaaaaatgcttgtgagggctgggtatggtggctcaggcttgtaatcccagcactctgggaggccaagggaggtggatcacttgaggtcaggagtttgagaccagcctgaccaggtcaggagtttgagacccaacatggtgaaaccccatctgtactaaaaatataaaaattagccgggtgtgatggcgcgtgcctgcaatcccacctactcaggaggccgaggcacgagaattgcttgaacctgggaggtgtgggttgcagtgagcaaagattgccccagtgcactccaacctgggcaaca[187 bp omitted]gtggcgggcacctgtagtcccagccactcgggaggctgaggcaggagaatggcgtgaatccaggaggcggagcttgcagtgagccgagattgagccactgcactccagcctgggcgagactccgtctaaaaaacaaacaaacaaacaaaacacgtataagcacctttttccaggaatgccaacatccttccaagggaaaagagcaaagtctcgtcaccacggtccagcttgtcctacagctgatgagggtgatggagctgctgtaatgtctgtcgttttcttcactggaagatgagaagataaatgtgggcggtctttgctgaataaagcagtgtgggatttgtggttcccgagcaaactgtgtttgggtagcaagggccctttctggttgctccccaagctggtcgcctttctggactgaccccacccaccctccccaagttactctgtggcccccaaaacaaagtttttttgttttgtttgagacggaatcgcactcttgtcgcccaagctggagtacagtggcgcgatctcggctcactactacctccgcttcccgggttcaagtgattctcctgcctcagcctcccaagtagctgggactacaggcacccaccaccatacccagttaagttttgtatttttagtacagatggagtttcaccatgttggccaggctggtctcaaactcctgacctcaggcgatccacccgccttggcctcccaaagtgctgggattacaggcatgagccactgtgcccggcacttcttccatctttacctggtggtcattagatgttcaaccctgggggtgttgggagacacccccagagggcaggccagggcctggcctgcagctattattacaggctaagttagcaattgacaattgaggacttactatgtggcagccacaggtccttccttccttccttccttccctccttccgtccctcttttcttttcttttctttctccctctgtcacccaggctggagtgcagtggcacgatcttggctcactgcagcctctgtctcccaggttcaagtgattcttgtgcctcagcctcctgagtagctgagattacaggtgtgtgctaccacacctggctaatttttgtgtttttagtagacaagggatttcaccatgttggccaggctggtcttgaattcctgacctcaagcgatcctcccacctcagcctccccaagtgctgggattacaggcatgagccactgtgcccagcccatctaatttttgtttttgttttttgagacagagtctcactctgtcttgcccaggttagagtgcagtagctcgatcttggctcactgcagcctctgcctcctggattcaagcgattctcctgtctcagcctccagagtagctgggattataggtgcctgccaccacgcctggctaatttttgtatttttagtagagatggggtttcaccatgttggccaggctggtctcaaactcctgatctcaggtgatccaccaacctcagcctcccaaagtgctgggattactggcgtgagccaccgtgcctggcccatctaatatttttttaaatgtttattgagaccttatttacatatcagtcaataaacatatcttcagttgtatggttcaataagtttgacaaatgcatacgctcgcataaccaaaacaagatatagggcacttcactccctccagaatattcccttgtcaaccctccacactcagtggcaactacggatctgttttctccaactatcagtgagaattacatgtttagcacttcatataaatggaattgtgcagaatgtcaccatttgtgtctggcttctttcccttggtgcaatgcatttcagattcaccccaaaacagccatgtttctttcttttttttttttttttttgagacggagtctcactctgttgcccaggctggagtgcagtggtgcaatctcggctcactgcaggctctgcctcctgggttcacaccattctcctgcctcagcctcctaagtagctgggactacaggcacccaccaccacgccctgctaatttttgtattttgggtagagacggg[132 bp omitted]gtcctttttcattgctgtgtagtattccattgtattgatgggccacagtgtgtttatacatttaccagttgatggacatttggcaattgcagttggagcaactgtgaactcattcatgcacacagctctttgtgggtatcttgtgatattttaccctccaatttcactcagtctcatggaactttctcctaccagggacacctatggtaaggtgatttccagcatgggaactttgctaaagaaaggggcaattgggccgggtgtggtggctcacgcctgtaatcccaatactttgggaggctgaggcaggcagatcacgaggttaggagatcgagaccattctagctaacaccatgaaaccccatctccactaaaaatacaaaaaattagctgggcgtggtggtggtggtggtgcatgcctgtaatcctagctactcaggaggctgaggcaggagaatcgcttgaacctgggaggcagacattgcagtgagctgagattgcacaattgccctccagcctgggcgacagagcaagactctgtctcaaaaaaagaaagaaagtggcaatcggccagatgtggtggctcactcttgtaatcccagcactttgggaggcttgtaatcccagcacctggatcgcctgagtccaggagtttgagaccagcctggacaacataatgaaaccccatctctaccaaaaatacaaaacaaacaaacaagaacaaaacaaaacaaaacaaaacaaaaacagccgggcgtggtggctcagcactttgggaggccgaggcgggcggatcacccgaggtcaggatttcaagaccagcctggccaacatggggaaaccccgtctgtactaaaagtgcacaaattagtcaggcgttgtgacacatgcctgtaataccagctactcaggaggctgaagcaggagaattgcttgagcctgggaggcagaggttgcagtgagctgagatcaggccactgcactccagcctaggcaacaagagccagactctgtctcaaaaaaaagaaaaaaaaattagctgggtgtatggcatgggtctgtagtctcagctacttgtgcagctgaggcgagaggatctctttagctcaggaagtcgaggctgcagtgagctgagattgcaccatggcactccagcctgggtgacaaaatgagaccctgaaaacaaaaaagaaaagaaatagagaggaaagaaagaaagaaagaaaggaaagaagaaagaaagaaagaaaaagagaaagagaaagaaagagagagaaagaaaagaaaagaaaagagtggcagtggctgtccttgtacctaatcataggacagaggggagaccagacccagcataggtgagggaagccgtcagggtcattagtggcagctggtgtgtctgaaacagccatggtagggcagcaggatgacccagacaggaccttcggtttatcacaggggacaggagtggaaatcaagagaccctagagggcctggggatcacttgaaaagggtcacaatgatagcatcaggtggggctcatggtccagccctgcccccctggagaaggagcacagggcagcctctgagccccggcctcggcatcagtgcggttgacaccggggccatcaccatctgataataggttctgtttggaacagctgcctggtgacaagtataataaaacgtattaacgaggccattattactccctaattaaaagctaataactaagagttaattgcctttaaaagatgaagcaaggctgggctgggacttatctctgttttcctttgcttgcctggataggctgatatttgggaactaattaattgagtcgaatcttacaggaaactaatatctcctctgccattgcggctgttggattaaaaagcgtttgctgtgtgtctgggcatttctgtggaaaggtctcctgtgtccactgttcttgccggggcgggggtggtggtggtgaggcttcaaggtgcggctatggggggctgcttgtcctctcctttcctgctgattctcccgcaatggtagcccaagcatccatgcaatttgtgagtcagaatgctcagatgctgttccagggaacagacgggccgagcttatatcacagatctatcgtcgtcatcatcatcaccgtcattaaaaaaaaaaatcaggctaggctctgtggctcatgcctgtaatcccagcattttgggaggccaaggcaggtggatcccctgaggtcaagaattccagaccaacctggccaacgtggcaaaaccccctctctactaaaaatacaaaacttaggcaggcatggtggcaggtgcctgtaatcccagctactcaggaggatgaagcttaagaatctcttgaacctgggaggcggaggtggcagtgagctgagataagatggcaccactgcactccggcctggacgacagagctagactccacctcaaaaaacaaaacaaaacaagacagtgctctaactgcaagcatacaattcgatggcttttgtacatataaacacttcagttaccaacactttaacaaaatagaacaagggttagcaaactctggtccctgggccacattcagtccactgcctgattttgtatggcccatagactaaaaatgtttctacgttaaaacaatttttaataatattcaagcttttgctcattctttcatttatgcaattttctttgagatggagtcttgctctgttgcccaggctggagtgcagtgacatgatcatagctcactgtggcctggacctccaaggctcaagcaatcctcccacctcagcttcctgagcagctgggactacaggcaaccccgccctctcctcctgcattcagcttggatgttgcttcctccaggaagccttccatgcctcctgatgcccatctctctgggtgccctaggtgctaaggacggctgcgattatgccactgcactccagcctgagcaacagagtgagacctggtctctaaaaggaagagacatctttctccatgaagcctcaaaggatttcaggcatctttccacacttaactgaaaacctactcccagactgagatttaagcagcctgtgtggactgggaggaaactttaaagagctttacaggacagggcagggaagggctgtcagcagaaggctcagcccaagcgaaggttaggatgccgagcttgtcagagggggtttgaggaggaaccggtgtcggcctgggcccggcccacctggagccctcggcgcagtgaacatcagctgtgctggtcacgttgcctccatcattctgtgcatctgtgcagcgtggccatgtgccagccaagaggacccagagtgtagcaagaacaattagcccatgacggatggcgcctcggtccaccttacttttggcaaggctaattgttgaagtaaagcttccaccggggtcactcgctactgcactgggcggtgtttcccaaaccccgtctccaggaaactgacatggacctgggagttgtgggagggggtcccctgagctggtttgctctcagcactggggtctctgcagagtctcccaggaaaccacctgggcttggcttgggtgtttgttgctgggaaggtttatcatgtataagaccacagacctcagtccatcccctccctccctccctccctcctttccttccttcctccctccctcccttcttccctccctccctccctcccttcttcccttccttccttccttcctacctccctccctcctttccttccttcctttctttcttttttttttttcttcagggtgttgctctgttgcccaggctgtaatgcagtggttccatctcagctcactggagcttcaacctcctgggttcaagcaattttccacctcagcctcccgcgtagctgcaaccacaggcatgcactgtcacaagcagctagctttttacatttttagttgagatatggtcttgctatgtgttgcccaggctggtcttgaactcctgggctcaaatgatccacccgccttcgtctcccaaagtattgggattacgatgtgagccactgtgcccagcttcctgtccttaaaaaaaaaaaaaaaaggcc[141 bp omitted]gtggtgcacgcctgtagtcccagctactcgtgaggctgaggcagaagaatggcatgaacctgagaggc[132 bp omitted]cagacaggatactgtacacgcttcactcagcttcccccgatggttacattttattacatgatcaaaaccaggaaattgatatggatacaatgtattcagttctttttttttttttttcttttttgctcgttctgtcacccaggctggagtgtagtggcgtgatctccactcactgcaacctctgcctccctggttcaagtgattctcctgccccagcctcccaagtagctgggattacaggtgggcgccaccatgcctggctaatttttgtatttttagtaaagacggggtttcaccatgttggccaggatggtctcaatctcttgacctcctgatccacccgcctcagcctcccaaagtgcaatgtatctatttctatgtaattgtatcacatgtatatatatatttttaagagagacagggtcttggggccgggcgcggtggctcacgcctgtaattccagcactttgggaggc[135 bp omitted]gaggcaggagaatggcatgaacccaggaggcggagctggcagtgagccgagatcgcgccactgcagtccagcctgggcgaaggagcaagactccgtctcaaaaaaaaaaaaaaaaaaaaaaaaaagaaagacagggtgtcactgtgtcacccaggctgtagtgcagtggtgtgatcatagctcactgtagcattcaactcctggggtcaagcaatcctcccacctcagtatcctgagtagctgggactacaggcatgcaccaccgtgccttgctgatttttttaatagagagggggttttgctatgttgcgcaatctgatcccaaattcctggcctcaattgatcctcctgcctcagcctcccaaagtgctagcattacaggtgcataccaccacactaggcttattttaaaatttgtctgtagagatggggttttgctatgttgcccagtctgatcccagattcctagcctcaagtgatcctcctgcctcagcttcccaaagtgctaggattacaggtgtgcaccaccacactaggctaatttttaaatttgtctgtagagatggggttttgctatgttgcccaggctggcctccaactactggccccaagtaatcctcctgcctcagcctcccaaggcactgggattacaggcgtgagccaccatgctcggctatcacacataaattcttgtaactaaccacagatgagatacagaactattcggtccccacaaagatctctctaaagctactccctgggagtgacccccaccccattcctaaccctaggcaacccctaatctcttctccagtctacaactttattatttcaagaatattataggacgggtgtggtggctcacacccataatcccagcactttgggaggctgaggcgggtggatcacttgagccccggagttcaagaccagcctggccaacacggtgaaaccgcctctgtactaaaaatataaaaattagccaggcttggtggtgggcgcttgtaatcccagctactggggaggctgaggcaggagaatctcttgaacccaggaggcagaggttgcagtgagtcaagatcgtgccactgcactccagcctgggtgacagagcaaaattccatctcaaaaaaaaaaaggaaagaaaagaaaagaaaattatatatatatgtgattaatggaatccaaacctatgttgcattttgaaattgcctttttttttctgtgaacattaggcccttaggagcagccagggggtatgtgggggtatcagcagttccttcctttttagccctgcgtcgtattccgtggtgtggatggaccacagtttgttcaacgatccacctgttgaagggtacctgggtggagtccaggttttgtctgttgggaataaagctgctatgaacatttgtagacaggtttttgcatagacatacgttcccatttttctaggatgaatgccaggagtgcaattactggacgatgtggaaagtgtttcgggttttaagagttttcccagagtggctataccatgttacatccccaccagcaaaggatgagggatccagtttccctgtacttagaacgtcttttatccccattcaggctcatcctggaagccacacatcccagcgtttgcagaggctcctgggtttcacggagaggtctgggaaggggagaaaaatgcgagcttgtggttctattctaggaaatcgccacaggcttcactctggagttggaaatctcgcctgtggagctcagagccttcataagcttgtgggatccaagatgcctcacgactgccagacagagaatccacacagatcgggcgccagaatttgaagcaacagtcaggctccagcaggattttatcttaaaaaacaaaataggcaattggctgggcgcagtggctcacacctggaatcccagcactttgggaggtcgaggcaggaggattgcttgagcttgggagttcaagaccagcctgagtgacatggcaaatccatgtctctacaaaaaatacagaaaaatgagccgggtgtggtggcgagtgcctgtaatcccagctacttggaaggctgaggcaggaggatcgcttgaacccaggtggtggaggttgcagtgaaccaagattgctccactgcactccagcctgggcaacagagtgaggacctgtctcaaaaacaaaacaaaacaaaacaaaaacaaaaacaattgctttactttatcttattgtcacttccatttcatttaccattgcaactgtgtgcaaatgcttagaatgaacaaagaaattatgaagtgccagggggaaatattgccatatttttcttcccccaaattgcacgctagaacaatcccacacccttccctgccactttgattttgcaccaccaatagtcatgggggacacttttacaagaagaaaaaaataaaaataaaaataagaaggccaggcgcagtggctcatgcctttaattccagcactttgggaggctgaggttggagatcacttgagcccaggaatttgagaccagcctgagcaacatagcaagacttcatctctacaaaaaattacaaaataagccaggcgtgttggcacatgtgtgtagtcccagctactcaggaggctgaggtgggaagattgcttgactccaggaggttgaggctgcagtgagctctgattgcactctgggagacagagcaagaccccgtctccaaaaaaaaggaaaaaaaagaaaaaagaaaagaataaaatgaggctctattagtttccccaagagtctcttttaatccactgctaatcaaatctctctctttttgttttttaactttttgttttggactaattatagacttacaagaagtttcggccgggcgcggtggctcactcctataatcccagcactttgggaggccaaggcgggtggatcacaaggtcaagagattgagaccatcctggctaatacggtgaaacaccgtctctactaaaaatacgaaaaattagccaggtgtggtggtgggcgcctgtagtcccagctacccgggaggctgagg[136 bp omitted]tagatacccttcatccagcctcctctaatggtgacgtcttatatgaccttggggcaatatcaaatccaggaaattgatgttgggataacactgggaaatagacagatatacaaattgtgatattttctaaacctgcattcgtgtgtgtgcacgtgtgtgcaaacctgcattcgtgtgtgtgcacgtgtgtgcaaacctgcatttgtgtgtgtgcacgtgtgtgtaaacctgcattcgtgtgtgcacgtgtgtaaacctgcattcgtgtgtgtgcacgtgtgtgtaaacctgcattcgtgtgtgcacatgtgtgtaaacctgcattcatgtgtgcacgtgtgtgtaaacctgcattcgtgtgtgtgcatgtgtgtgcccagttctatgcagttttattccatgtatagattaatgtaaccatcaccgccatcaagatacagaactgttccatctttacaaagtaactccctcatgctacttttttttttttttttgagatagggtcttgctctgttgcccaggctggagtgcagtggtgcaatctcagctcactgcaaccgccacttcctgggctcaagtgattctccagtctcagcctcccgagtagctgggactacaggcacacaccaccacacctggctaatttttgtagtttttgtagaaacaggttttgccttgttgcccaggctggtctcaaaacactcctgagctcaagcaatccggccacctcagcctctctctccaagtctgggatcacaggcgtgagccactgcacctggtcaccctcatgctacctctttatattcaacatcccacctccacttccctgtcccatcacaaccactaatctgttctctatctctatggttttgccattttgagaacatcatataaataaaatcagagagcatgtactctttgaggttgactgcttttactgtttatgagacagagtcttgctctgtcagccaggctggagtgcagtggtgagatcatagctcgccgtagcctcaacctcccaggttcaagcaatcctcccacctcagcctcttgagtagctgggactacaggcatgcaccaccacgctcagctaattttatttatttattttttttaaagatagagtctccctctgtcgcccaggctggagtgcaatggcacaatctcggctcactacaacctcggcctcccaggttcaagtgattctcctgcctcagcctcctgagtagctgggattacaggtgcgcgtcaccacgcccagctaatttttgtatttttagtagagacagggtttcaccatgttggtcaggctggtctggaactcctgaccttatgatccacccacctcaacctcccaaagtgctggaattttatttgtttatttatttagatggagtcctgctctgtcacccaggctggagtgcagtgccacaatcttggctcactgcaacctctgcctcctgggttcagacgattctcctgcctcagcttcctgagtagctgggactacaggtgcccaccaccacgtccagctaatttttatatttttagtagagagggggtttcaccatgttggccaggctggtcttgaactcccgacctcaggtgacccgcccaccttggcctcgcaaagtgctgggattacaggcatgagccaccacacctggccaaatctttaaaaactttttttgtagagacgggagaatatcgctatgttgcccaggctggtcttgaactcctggccccaagtgatcctcctacctcagcctccccacagggctgggattactggcgtgagccactgtgcctggtctgttttcacttcatcatgctcttgaggtccatccaggtctcaatcttttgtccttttttttttttttttttttgctgagtaatattccaggcatggaatggaggtgctgccatatgttcaaccatccaaccacagaagggcctctggtttccagtattttgctatcatgaataaagctgttatgaatgtgtgtgtactattttttgcatgaacacatgttctcatttctccaggattggtgcctgaattgtattcaattgccgggtggtatgcgaattgcatgttccagctttggagaaactgccagactgtttccacagcggccacgccctcttacatccccaccagcactgcgggagagagccagtttctccacgtcctcaccagcatttggtgttgtcattattttttactgttctaataggtgtgaagtggtgtgtcattctagttttaacttacatttcctaatggctgatgctgttcaacatcttttcatgtatcagatctttctctttaaaaacaaaaaattcattcaggctttccatacaggaaacagtggattattccattacacacacacacacactcacacagacacacacatagacacacacacacattcacacacatacatactcacatatacacacacatacacacacatacacatacacacacacatacacacatacacacacacacagatataattttttttttgagatggagtttcccccttgtcacccaggctggaataaagtggcaccatagctcactgcaacctccacctcccgggttcaagcaattcttctgcctcagcctcccaagtagctgggactacaagcgctggccaccacacctggctaacttttgtgtttttagtagagagagtgtttcaccatgttggccaggctggtctcgaactcctgacctcaggtgatccacctgccttggccttggcctcccacagtgctgggactacagacgtgggccaccgtgcccgccccccacctcttttttttttttttttgagacagggtctctctcagtcacccaggctggagtgcagtggtgcaatcatagctcactgcaacctccacctcctgggctcaagcaatccttccacctcagtctctgaagtagctgggactacaagtgtgcaacactatgcctggctaattttgtttgttatagacacaggggtctcactctgttgtccaggctgattttgaattcctgggttcaagtgatcctcccccagtgctgggattacagatgtgagccaccatacccagcctccaatgcacatcctggtgaatttttacattcatattgtgaggggtgagtgaacggtgggctttgggtggggggtcagaaactccccagcacccctagttcaccctcacagggctgagcttacttctgcaggcagagcaaatcccccaggcggactttgccgtttgcaatcagcagtcattaattagtgtgtttaggtgaacacagctgttgtgatcagggcctctgcagtatccactaatttatttttattttatatttttttgagatggagtctcggtcttgttgcccaggctggagtgcaaaggtgccatctcggctcactgcaacctccacctcctgagttcaagcaattctcctgcctcaacgtcccgagtagctgggattacaggcacccttcaccacgtctagctaatttttgtatttttagtggagatggggtttcaccatgttggccaggctagtctcgaactcctgacctcaggtgatctgcctacttcagccttccaaagtgttgagattataggcgtgagccatggcgcccggctgtatccactaatttaacagtgactgacttattttccagggcgtcccactgttctcaggacacgcccctcaatgtggccctcacagctcatgctgaggtttgaaggtgccccttccaaaattcacatgttgggacttaatggccaatgtgatgggtattaacaggtggagcaggtaggaggtgattggggcctgaggacaccttcctggtgaatgagattaaggccctcataaaagaagcactgagaacggtcggctctttttgcccttccaccctgtgaggacaaagcgttcttcctctccagaggatgcggcaaccaggtcccgtcctgaagcagacctcagccgtcacgagcgactgacctgccggcaccttgatcttggactacctgacatgcagaaccgtaaggaaatcaatttctgttctttataaatgacccagcctgacgcattttattagagccatgaaaatggattgagacaatcctccatctcttgcctctgcctctccgaatttgtttcatgcaatattccccacccccaaattcctcaaatgcaccaagcccccatccatcttgccagcctttctctgggctgcttcccagaaccactttcatccttccttcaggccagctccttcctattcatccttttgaatcttggcttaaacgccacttcctccaggaagcctcccctgcttgctaccttccggtctgagcccctgttccagatcctcacatctccctgggctcgcctttggagaacttctcatggccatatttataaccatgatttgcaggcaatgtagggcttctcttatctgccttgatttgcttaaggccaggggtttgagactggcctaggtaacatggcaagaccccccccccccgccaacccacccaccaccccatctcttcccacggggcagaaaatccagccttgcggtatccgagacactcagcctggagcctggtatacagtaggtgctcaagcagagaaactcaggaggggagtgaagcgcggcctaaatcacgtggctcagcccattgcatatttcctgctgttttccacgtcccccgggggacccactggccctctactcaggacgccaggaattgaaagtaagtgttccctccacaagtttcccccatctacgttcatcttctgcacgggctaattttattaaagttcctcaaagagagaattgtaaattcattagcacgcatgttagaccagaccttcctttacgccgggtagaaaaagattaggagtcagctgagcccgatgataatgaaacagaagatgctaaaacatcattcttaattaaactgtaatgagataagaagttgtcgccggcttgtgggcctggcttgagtcgctcatgttcccatcgtaaatctatgatttatggttctcctccctcacagatgtaattagttttttccccctctaaacaaaaaatcctaaacactacttcgattatatatatgtataaaaagcctggaccacaattggaggttgtttttatctagctggaataataacttcaattaggaaaaaaaataaatgctggaggttgaaagagggagaattcaagaggaggagatgaaggaaagttggggggaagtgcccagttccgtcctggcccagactcttggactctgcccaggtggtgcttctgccaggatagcccttggtcattttagggatctgcggacatttttcactgtggaaaccttccccagatccctgtgtctccctgagcctcatagctggtttgtggcaggttttgtatcatggtagatctcgcagctgcatgcttcaagaatatttggggtctaggctgggtatggtggctcacgcctgttattccaacactttgagaggccagagcaggaaatttgcttaaggccatgggttcgagaccagcctggttaaca[187 bp omitted]gtggcgggcgcctgcagtcccagctactcaggaggc[136 bp omitted]tgcatgcctgcagccccagctactagggaggctgagctggcagaactgcttgagcctggaagttcgaggttgcagtgagctatgattgcaccacgcactccagcctgggcaaccgagcaagaccctgtctgccttcctgttgtctacctctcttccccaagaggaaccaggtgcctgactttggggactccacaatctcggggagggaagctgatgttcatcagataaccacacaccaaaatgagagctatggtagctggacagggtgggaggagagctttggacgaaggcccagaggtgggacagcaaggatgggatgatgggaagctggggagtgaggagttggccttgggaggtcctgggaggtttaaaagtctgttttaaattgagatcatttacatagcataaaaatcaccgctttaaagtggacaattcagtgttgttttagcacaaagcgtgcaaccatcacactatgtaattccacaacgttccagcaccccaaaaagaagccctggctgggcgcggtggctcacacctgtaatcccagcactttgggaggctgaggcgggtggatcacctgaggtaaggagttccagaccagcctggcccacatagtaaaagcccatctctactaaagatacaaaaaattagctgggcgtggtggagggtgcctgtaatcccagctactcgggaggctgaggcaggagaatggcttgaactcaggaggtggaggttgcagtgagccaagattgcactattgcactccagtctgggtgacaggctgagactccgtctcaaaaaaaaaaaagcccatccctatcaacagtcactctccctcccctccccaaccctgtggtcagccacaaatccccttcctgtctctgtggattggcctgtcccggacatttcatggaagtgagatcatacactgtgtggccttttgtgtctggcgccactcactgagtctgaggtcctcaaggtgcatctgtgctgtttcctgtgtcagagcctcattccttttcatggctgaataatattccattttacagatagaccctgttttctttacctattcttgtgttggatgttcggattggtttcacatcgtggctgttaaaaatcacactgctataaac[131 bp omitted]gaaacctcatctctactaaatacaaaaaaaaaaattagccaggcatggtggcaggtgcctgtaatcccagctacttgggaggctgaggcaggagaattgcttgaacccgggaggcggaggttgcagtgagctgagatcacgccactgcactccagcctgggtgacagagcgagattccacattctaccacagtgtagccgcatcattttacctcccgccggctgtggacaaggactcccgtatctgcacacccttaccagcgcttgtgagtgcacgtttttctgtctgtgtttgcttttcgcttggattctagctctcacagtgggtgggaagtgtggggtcgtgcaatagctggttcaccgaaagggatcgcgcttgcgggcggctcaaactggagtgatggtgccagggaggcccggggacaggatgcaatttgcaattccccgtagctctctgtcatcctcctgcccagggtcctatttgagggctcccacagtgggagtgtttcaggaatggggttccgatccagaccctgagagagagggttcttggatctcacacaggaaagaagtcagggcaattccataaagtgaaagcaagtttattaagaatttaaaggaggctgggcgcagtggctcatgcctgtaattccagcactttgggaggccgaggcgggcggatcacctgaggtcaggagttcgagaccagcctggccaacatggcgaaaccccttttctactaaaaatacgaaaattagccgggcatgttggcactcgtctgtaatcccggctactcaggaggctgaggtgggagaatcgcttaaacccaggaggcagagctgatagtgagccgagatcgtgccactgcactccaacctgggcgacagactgagactgtgtctcaaaagacagtaaaggaatgaagaatggctactccatagacagagcagccctgagggctgctgattgcccatttttaggttttttcttgatgatatgctaaacaaggggtggattattcatgcctcccctttttagaccatgtgggtaacttcctggcgttgccatggcatctgtaaactgtcatggtgctggagggagtgtagcagtgaggacacccagaggtcactctcgtggccatcttggttttggtgggatttgaccagcttctttactgccacctgttttatcagcaaggtcttagtgacctgtatcttatgccaacctcttatctcaatctgtaagttagaacatccaacctttggctgggtgcagtggctgatgcctgtaatcccagccctttggggggccgaagcgggcggatcacctgaggtcaggagttcgagaccagcctgaccaacatggaaaaacctcgtctctactgaaaatacaaaacattagcttggcatggtggcacatgcctgtaatcccagatactcaggaggctgaggcaggacaatcgcttgaacctgggaggtggaggttgcagtgagccgagatggcgccattgcactccagcctgggcgacaagagtgaaactctatctcaaaaaaaaaaaagaatgtctaaccgtctgggaatgtcacccagtgggtctcagcctcattttacccaactcctattcaagatggagctgctctggttcacacgcctctgacaggagggaggagggggttaagccggcccagacatctcagagctgggaaacttcagctgggcccccaaacacagcgaggctgcctattcaggggagccattcagccgttgccctgtttgaaaaggccaagcctctgtgtgcaaagcctcaaggcaaagtggcttcgtgccttcctttgtgaggtccagctgctggctctttgtctggggggctgtgggggtgggggcaggcctgccctggcctctcctgaaaccctcccagctgcagccacccctttgtctgccctgattgaaatgcgaagagaaaattagaattccctggccttctctcctcctctttcttctggattttaatgaattcagcccttacaggctgcgcaggtgaagaaaatggctttggagacttttttgttgttgttgaattattttcatttccaggacgatgttcgcgttcaacttcattccgcagaaggttcccctaaagtggtctgggctgctgcttcctgatttctggctggtcggccagagttccaatcagactttttgttttgaatccacaaagagactttctagagctttatctgatctgttctaggaggcagataaccataaataaaattaaatatgaaagaaacaaaattatggtaataaaagtttgcctgcccaaggacttgaactttaagccaattgtcctaatcacagtggtttatgactgtcatcccagccctttgggaggctgaggcaggaggatcacttgagcccaggagatggaggctgcagtgaggcgtgtttgtgccactgtactccagcctgggaaacagagtgagattctgtctctaaaataagttttttttttttttttttttttttttttttgagacggagtttcgctcttgtcaccccggctggagtgcaatggcacgatctcagctcactgcaatctccacctcccgggttcaagcgattctcctgcctcagcctcccaagtagctgggattacaggcacccaccatcatgcctggctaatttttgtatttttagtacagacagggtttcaccatgttggccaggctggtcttgaactcctgacctcagttgatctgcctgcctcggcttcccaaagtgctgggattataggcgtaagccaccacgcccgggctttaaaataagttttaaaaatataaaccgttggccgagcatggtggctcatgcctgtaatctcagcactttggaagggccgaggcaggaatattgcttgagcccaggagtttgagaccagcctgggcaacacagcaagaccgcgtctctttaaaaaaaaaataaaataaaaattatataaactaaccttcagaggagatggcgccttatcaacctgtctgggcttcccaccacattaataaaactggggtggatggtgggaccagtgagtttgtagccatctacactgtcttcaaatggcacactcttgtcgctggtcctcatgtgagctgtggcttcctctagacacagccttgccctgcactccccctcccctaggaagatcttggaatcttattcactgtgcaccttgagaaagccgttcctgatgccctcccaccgatgtacccacaaccactcatgccccacctggtagagctcttggcaccaagaattgaaattgctgaaattgtcttccctgagtctcactcagcaacaaaacccatgtaagcaggaagtatgtctggttcactttttttttttccaagacaaggtctcactctgttgcccagtctggagtgcagtggcacaatcttggctcactgcagcctctgcctcctgggttcaagtgattctcctgcttcagcctcccgagtagctgggactacaggcgcctggcctcatgcctggctaatttttgtattttttagtagagacggggtttcaccatgttggccagggtggcctcaaactactgacctcaggtgatccacccacctcggcctcccaaactgctcagattataggcgtgagccactgtgcctagcctcttgttcactattgaatttccatggccttgtggcttgttgagggtagggaagactctagggccaggaggtccaggttcacatcctggctctgctatttcctggctgtgtgaccttgggcaagttatttaacctctctgtgccagtttactaatctacaaaatggggatgatattatatcagagggctgtgaagtactacgggcagtcactcaataaatggaagctgtttctcataagatagtggcaggaccccgggaaacagcatagttagcaagatatagctctgtctcagtctttcgtttgttttttgggacccaggctggagtgcagtggtgcagtcatagctcactgcagcctcgacctcctgggctcaggagattctcctacttccccgaatagctgggaccacaggcacatgccaccacacctggctaatttttttacagagacagggtcttgctatgttgcccaggctggtctccaactcctgggctcaagtgatcctcccaccttggcctcccaaagtgctgggattccaggcatgagccaccatgtctggcctctgtctcattcttgtggctgcttctctctgcctgtggtaagctgagtctataacagcagagatggatggaagcatgttcctttatgttttgttttatttttatttctttatttttttgagatggagtcttgttctgtcgtcaggttggagtgcggtggcactatctcggctcactgcaatctccacctcctgggttcaagtgattcccctgcctcagcctcccaagtagctgggattacaggtgtgcaccaccatgcctggctaatttttgtatttttagaaaggaggttttgccatgttggccaggctggtctctagctcctgacctcaagtgatctgcctgtcttggcctcccaaagtgctgggattacaggcctgagccactgtgcctggctatgctcctttatttatttattttttttccgagatggagtgcagaggcgtaatctcagctcactgcaacttccgtctcctgggttcaagtgattctcctgtctcagcctcccgagtagctgggattataggcatctgccaccacgcctggctgatttttatattcttagtagagacggggtttcaccgcgttggccaggctggcctcgaactcttgacctcgtgatccgcctgcctcggcctctcaaagtgttgggattacaggcatgagccacagcacctggccctgttcctttattttttaaatttgtttttaatgacacaattacgatataaaagcatttttcataatagaaatggtgccgtaaaaactaaagtttcgttcactcctctttaatcctatgctcactgtggccctctgtgctaattttattttattcattttttaagagacagggtttcgctatgttgctcaggctgtccttgaactcctgggctcaagcgatcctcttgcctcagcctctcgagtagctgggaccacaagtgtgccccaccaaacctggctaatttttagattttttgtagagatggggtctccccatgtttccccaggccgatctgaaactcctgggctcaagcgatactcccacctcggcctcccaaagtactaggattgcaggcgtgagccactacgccctgccccttgcctcagtattgaatttagtggccatggtctgagtaaatccagcccaccactggttttgtaaataaagtattattgaaacacagccatgcccattcactttgtctatggcttttatactttactggcacaggtgaccagatgcaacagagactttttggcctgcagagcttaaaacatttaccatctggttctttacagaaaaagtttgccaacttctgttcaaaagcttcagcattatcaagttaatgtctcaagttgagaaaattcatttcctagtttgctgagtgtttattttaaacatgctttaaaaaaaaatcaaatgctgggctggcacggcggttcatgcctgtaatcccagcacttttggaggccgaggcaggaggatcatttgaggccaggagttcgagaccagtctgcccaacatggtgaaaccctgtctctactaaaaataaaaaagttagccaggcatgttggcaggcaccttataatcccagctgctcgggaggctgaggcaggagaatctctcgaatctgggagctggaggttgcagtgagctgagatcacgccactgtactccagcctgggggacagagtgaaactctgtctcaaaataaataaataaataaaaagaaatgttgccccaaagcattttaaaaattgatttatggtatttttattatggaaaaatatttccacatatttgttataatttgttacatttttattatttattttaataagtgatataatgggcttggcatggtggctcacatctgtaatcccagcactctgggaggccgaggcagggggatcacttgaggtcaggagttcaagaccagcatggtaaatgtggtgaaaccccgtctctactaaacatacaaaaattagctgggcgtggtggtgggcgcctgtagtcccagctacttgggaggccgaagcgggagaattgcttgaacccaggaggtggaggttgcagtgagccgagattgcgcctctgcatccagcctgggcgacagagcgagactccatctgggggaaaaaaaaaaaaaaaaaagataaaatgaacaccatatacttaacacccaaccaaaaaaatcaaacactacacttttttttttttttttttgagcggagcctcactctgtcacccaggctggagtgcagtggcacaatcttggctcactcactgcaagctccgcctcctgggttcacgccattctcctgcctcagcctccctagtagctgggactacaggcgcctgccaccatgcccgccaaatttttttgtatttttagtagagacagggtttcactgtgttagccaggatggtcttgatctcctgacttcgtgatctgccggcctcggcctcccaaagtgcggggattacaggcgtgagccaccgcatccagccaacaatacacattttattgcatttacctatgtaccgtttgctgaatacattctccttcctcctgcacagaaggaacaattaccctgaatttgtttaaaggtgagcttttctctttttttttttttttttgttttttgttttttgttttttggacacagcatcttgcattgtctcccaggctggagtgcagcagcgtgatctcagctcactgcaacctctgcctcctcagttcaatcgattcttgtgtctcccaagtagctgggattacaggcatgtacccgcacacccagctaatttttgtatttttagtagagatgggtttttaccatgttgctcaggctggtattgaactcctgagctcaggtcatctgcctgcctcggctcaccaaagtgctgggattacaggcgtgagccatcacgcccagcctcctaagactttttagcttttagattttacatgtattttgagttactattttgagttattttcatctattttgagttactttttgtatatggtatgaagtatatagtttcatacttcgcatatagatacctaggtggtccagcaacatttgttgaagaagttattctttcctaattaaatggtcttggtacccttgtcaaaaatcaactggccaagactgggatcacacctgcaatcccagcactttgggaggccaaggcaggaggatcacttgaggccaggagttcgagatcagacttggcaacatagcaagatcctgtctctacaaaaaaaaattaaaaactagctgggtgctgctgggtgcggtggctcatgcttgtaatcccagcattttgggaggttgaggcaggcagatcatgaggtcaggagttcgagatcagcctgactaacatggcgaaaccccgtctgtagtaaaactacaaacattggccaggtgtggtggtgcacagctgtaatcctagctactcaggaggctggagcaggagaactgcttgaacccaggaggcggaggttgcagagagcccagatcacatccctgcactccagcctgggagacagagtgagactctgtctcaaaaaaataataatagtaaaataataatacaataaattagctgggtactaattggtggtggtgtggtggtgcatatagctactagggaggctgatgtgggaggattacctgagcctaggatttgacggctgcagtgaactctgattgcaccattacactccagtctgggcaacagagtgagaccctccttttttttaaaaaaaaaagtccattagccatagatgtgtgggcttatttctggattctcaattttattccattgatctgtgtgtctgtccttacaccagtaccacagtgttttaatcattgtagctttgtagtcagttctgaaatggagaaatttgggttttctaatggtatttttttcctgcaaaatgattttgactatatggattctcttgtaattcattatgaatttgtggagtggcttttccatttttgcaaaaaagtctttgggattttgagggggattgcattgaatcatagagtacgtgaggtagtattgccatctagatgagtttttatatctttgctgcttatagtgtttccccctaactaatacgtgtttgctttgtcagttttaaaatgttctgtgatgaaattgcactgtaacttttcttcctgaaatctgcttgttttgctcagaatatttctgagatttgttcaggtcatggtgtatagttttaatggcctcatattcgttgctgtatagtattccatcgtgtgcctgtatcataatttttttctttttctgagatgaagtctcactctgttgcccaggctggagtgcagtggcacgatctcagctcactgcaacctccacctcccgggttcaagcaatattcctgcctcaacttcctgagtagctggcttcacaggcatctgccaccatgcccagctaattttttgtatttttggtagagacggggtttcatcatgttggccaggctggtctcgaactcctgacctcaggtgatccgcccacctgggcctcccaaagtgctgggattatggcgtgagccaccatgcctggcctttttttttttttttttttttcttgagacagggtctcactctgttgcccaggctggagtacagtggcacaatcttggctcactacaacatctgcctcctgggctcaagcaatcctcctacctcagcctcctgagtagctgagattacaggcagataccaccacattcaactaattttaaaacattttttgtagtgatgagttctcactatatgcccaggctgctctccaactattgggctcaagtaatccgccagcctcagccgccgaaaacactgggattacaggcatgagccactgtgcccagactttcataattctttatacattttcctgacggctatttagtttggttccaatattttaacgacaaataatgccactctcgacatatctgtacatgtccccttggacatatctgcaagagtctctgtcagatgtatatctaggaatggaatcgttgactgaaaaagttaggtgcatccttaatttactagatactctcaacttgtcctccaaaagcaccaatctgttctcactcagagtttctaaagtcaaactatccttgcattccataaatctgtctgagtcataacattgtattcttttaatgagatgttagatttccattgctgaaattttcttggcctttttgcatctaggcacataagtggaatgtgcttttttcctccttagtttgtcctcgtacagtttaggtaccatctcttttttcacctcataagctgacagttgacaaaaggtgcaaatcatctcttccttgcggatttggcaaaactcacttggaaaactatctgggaaggtgccttgtatggggcatagatctttactatcacttcactattttctttctctctctctctttttttttttttttttttttttgagaaaggtctctccatcacccaggctagagtacagtggaatgatcacagttcactgcagccttgatttcctgggctcaggtgatttttccacttcagcctgcagagtagctgggactacaggtgtgtgctaccatgcctggctaattttttgtatttttggtagagatggagctttgccatgttgcccaggctgatcttgaactcctgggctcaagtgatccgcccacctcagcccccaaagtgctgggattacaggcatgcaccaccacaccctgctaatgtttgtatttttggtagagatgggatttcacaatgttggccaggctggtcttgaacccctgacctcaggtgatccacctgccccaacctcccaaagtgcttggattataggtgtgagccactgcacccagcttccccatctttttctctcttcactgtctgttcttacaactatcctatggagggagagaaggggattttttgcataccagttctgctaccggtagcctccactgcccctgtctgtttcctccttggctctcccaatactcatcttaccaaaaaaaagaaaaaaaaaaggtttcatctctaaagtgttctatccccacttttctgatattatttgtactttctcttttttattatctttgcctaaggtttttggagttttcaaagaaaaggtttttgatcttgtcaatgcaaaagagc[131 bp omitted]atggtgaaaccccatctctactaaatacaaaaaaaatagccgggcatggtgatgggtgcctgtaatccaaactacctgggaggctgagacaggagaatcactcttacctggcaggtagaggttgcagtgagccgagatccaccattgcaccccagcctgggcaacaagagtgaaactcttgtctcaaaaaaaaaaaaaaaaaaaagttatttccatctttatcttcatttttttttatttggggtttttttttctatttgagtttattttctagtgatttgattgaaaacttggttcatgaactttttaaagttgacttattttcaaaatttcttttcttataagtgtgttaaagaggccaggcacagtggctggtgccggtaatcccagcactttgggaggctgaggtagtaagattgtttaaagccaggagttcaagaccagcctaagcaacaaagtgagaccctcctacctcaaaataaaaaaagggtaaatgtgttcaaggctatgaatttttctctgagcacaccattggctgcatcccgcaggttatgcatttcatgatgtactatttgaattgttcaatttgaaacactttgtaactttcacattgattttttttttttcagaggcagtgtttccctatgttcaccccaaagtgctgggatgataggcatgagtcactgcgcccggattacattgatttaacacataccttatttagaaatgtgttttaaggctgggcacggtggctaacacctgtaattccaacacttcggtgggaggccgaggtgggcgaattacttgaggtcaggagtctgagaccagcctggccaacatggtgaaaccctgtaaccctgtctctactaaaaatacaaaaaaaaaaaaaaattagctgggtgtggtggtgggcgcctgtagtgctacatactcaggaggctgaggcaggagaatcgcttgaacctgggagatggaggttgcagtgagctgagattcagccactccagcctgggcaacagagcgagactctgtcccccacccacctccccgccaaaaaaagtattttaaaatttccctcccccttccaggggaggctaattactcttcagagccaagatcaggatacctcatctaatatttgtttcttggaatttgtgaagatctctgttaatattttttgtttgtttttttgagatgaagtcttgctctgtcacctgggctggggtgtagaggcgcgatctcagctcaccgcaacctccttcctcctgggttcaagcgattctcctgcctcagcccactgagtagctgggattacaagcgtgtgccaccatacccagctaatgttttttatttttagtagagacggggggtttcaccatgttggccaagctggtcttgaactcctgacttcaggtaatcctcctgcctcggcctcccaaagtgctaagattacaggcgtgagccactgcacccagccgatctctgttaattttcacaaatgttccatgtgcgtttgagaatgttagagtaggaggggataatagggtttgttaaatatttttggccaagcttattaatgatgttagtcacatctgtatttttttgactacctgatctgttgcttctttttttttttttttttttttttttttgagacggagtcttgctctgtcacccaggctggagtacagtggtatggtcttggctcactgcaacctctgcctcccaggttcaagggattctcctgcctcagcctcccaagtagctgagaatacaggctcctgccaccatgcccggctagttttttgtacttttagtagagacggtgtttcaccatgttggccaggatggtctccatctcctgacctcgtgatctgcccgcctcagcctcccaaagtgctgggattataggcgtgagccactgcgcccggccttgatctgttggtttctaagagacatagtcctattcttccctgagctgggtccctggtgtcactaagatcaccccttctcattcctggaacttccctgaggtcatagggggctctttcatcctatctctggctcctgtgggtggcttctatgcccaagcaagaagtgactcaggcaagggtatagatacaaaatggctcactctccatccccagggatgtgattctggctcagtgcatggatctgctcattgagtggcctaggggtggagcagagtgtccccaacctgttgcttccctccacggactcagttcttccccagggcacttcgagaaggcagcaccgtgtgatgctcagggctgcgggtgagatgggctggggtacgaatcccagctccacctcaaactcattgtgtgcccctccctgagcctcagtttcctaatatgtaaatggggatttttttttttttttttttttttttggagatgggagtctcattctgtcgcccaggctggagtgcaatggcatgatctcagctcactgcaacctccgcctcctgggttcaagtgattctcctgctccagcctcctgagtagctgagattacaggcaggtgccaccatgcttggctaatttttgtgtttttagcagagacagggttttgccatgtcggctaggctggtctcgaactcccgatctcaggtgatccatctgcctcggcctcccaacgtgttgggattacaggcgtgagccaccgcgcctggccaaggggctggtaacttctatctcagagtgtctggcccatggtgaattctcagtcatggtcacttattagaatgagaacacgaggcagcccctacaggaccagggcttgggttcaaatcttggcctggccacttcatcggtgttttgagttttttttttttttttttttttgagacagtcttactctgtcacccaggttggagtgcaatggcatgatctcagctcactgcaacctctaactcctgggttcaagcgattctcctgcctcagcctcctgagtaactgggattacaggcgcccgccactgcgcctggctaatttttgtatttttagtagagttgagtttcaccatgttggccaggctgggtttcaccatgttggccaggctggtctcaaactcctgaccttgtgatccacccgcctcagcggtgtgtggtcttggacaagcaccaccacctctctgggccaactcctcctctgactgttcacacaaggaaacgagatcagctctccaggaccccaccgacctccaccccagggatgaaactggacaggcaggggcgcaacaaagactccacaatgggccggggtcagacgatcttcctttaatacaaagtcgatatatctacatacacgggggtgggaaaaccacccggctgcttccgctggaataaacagtgttgaaagtaaccgcagacctgcccttgtacaaagaggaacaactcgcttgctcagggtaggcgggtagaggggggcctgtccttctggttttgctcccaaactgccccacagtcccagggggaaagggtccctgatgtggggcagcacagccatacagccactgtccccgaagaagtaggatcctctctgtctccttgggggcgggagacggggagacagctcaggctctcagaggaggaccactgtcatctctctcctcttacagcagcgtccccctcaaccgcacccaacgccactgggtccgagctcccccatgaccttaccctcagaactgtatttgatatgtctgaaaatttaatttataaaaatgaaacaaaaagggggaaaaaaaaagccaagaaagaaaaaaggacatcccattcttctgtgagcaaagcacactttctgatggtaggaaaaattaaaaaaaaaaaaaaaaaaaaaaaagccaaggtacagccatgggcctggcgtgcgcgtttgcgaacgtaactatcacacaaggacgctttctacagtgaaaaaatagactgtctttgaacagaatatgaataagccaaagttagttctctttgaaagtcattgactggcgagtcttttgtttgtttctcttaaaaaaaaaaatggaaaaaaaaatacactatttaaaaaaaatgaaatgtcacgggatacagttacactgagagttttaaaagaaagctggattctggtcccagcccagtgtccccaggctgcagagcggggaggagccccccgggtccccctaccaccgctgggggaggacgaggggtccgtctatggtctgtgccccaccctcctctggttctggggagcactcctatttgctcaccatccccccaccccccaccccggaatctggttttggaattggaaggaaaggaggaatgtgccaagtatttgaaggcggcggccggtgccagggaggtcgctggggcggccggggccggtgggggggctcgaggggctgcgtcgtcctcggaaatggtgcagaaacacagctgctgccgctgccacctcctgccctgcccactgggggtccaggcctcaggaggtccgcccgggaggggcagaggcatccggggccagtggtgtcgggcctggggggaaccatggctttaggttgcatagtggtcaaagcttccgaggtactccagtgccgcctggtaacagaactggtactcatcctgggggagcagaggtgacctgttagtacctccgctgctctaacgcctcccagggctccctatcgccctcaggagcaggccaagctcctcagccttgtgcgtgtctcttgcagaaggtctctttggcccccacggccctcccacaatgaagtgagctatgccacacctctctgcctaacacagccaggctcttcacccggaacgccctctcctcccgtctgcctggaggccctattcatcttttcttttttatttattttgagacggagtctcgctgtgttgcccaggctggagtgcagtggcgccatcttggctccctgcaacctctgtctcctgggttcaagtgattctcctgcctgagcctcccaagtagctgggatgacaggcgtgtaccaccatgcccagctgatttttgtatttttagtagagacagggtttcgccatgttggccaggctggtctcaaactcctgacctcgggtgatctgcctgccttggcctcccaaagtgctgggattacaggcataagccaccacacccagcctcatttctattttttttgtagagatggggtctttctgtgttgcccaggatgggctcaagcgatcctcccacctcagcctcccaaagtgctgggattacaggtgtgagctgccacgccgggtcccctctactcatcttttaagacatggctgctgttcagaaccccctccactggaacattccccttgaagctaggagtctgggcctcagtttccccatctgtacattggttggacttgggggtcagtggttcttggcagggtccaggctgagccacagacttgctgtgacttggggactgcaatgagcccatctctgtccactccaagggccacttctcgcctttgaccttcagctgactgttgtgttaaaagggttactggtccccttccagtgcgggaggggtctgtggaccgtctacccacagtgacccagagagtcccaggtggctgtacccatctcacagaggaggaaactggagcttaggggcagtcggggcgtgaggccaggctgcctcccctccctgtcccatctttacctctgtctgcaccatggccggccgctgggttcgtagcatcttcaccgtctgaaagatgtccaccacgccttcataccgcatccgctccagcacgatgctaagcgtgatgaagacgcccgtcctgcccacgccggcactggtggcagtaaagtgagcacagccattcaggggcaggtgctggggagccctgatctgaccacccgattccccgaggactctaacagcccagatgggacagcctaagcttggggctgtccccaccaggcctcagtttccccagcagggccaaaagctgggacactcgagggagctcacctgcagtggacagagatggggccgtcctggccaaactgctccttagtcttatgcacttggccaatgaagtcgatgaagccctcccccgactttggcacaccctgttccggccagtctgtgaactggaactgccggacagtccgggactggccatcctagagtgcagagagcccaatcttgttatcaggtcagcagcggccatgggggtttttctccatcctccctatcttcacccccattttttgtttgtttgtttgtttttgagatggagtttcactcttgtcgcccaggttggagtgcaatggcgtgatctcggctcactgcaacctccacctccagtgattcaagtaattctcctgcctcagcctcccgattagctgggattacaggcatgagccaccaggcccggccctcacccccattttgtacactctctgccattcatttaccctgacaacttaccgtccttcacaatccaatggtactgctttccataagagatgctccaacctcatcctcaccacttcttgccacccagctgttcctctccccacatttcctgtatgacatccagcacctccatcctccatcctttgccatcccatagtgcaaccagctctgcccttcccagctcctattcaccatgatcctctgtcatcttccactctgtgccatttcggggccctacagcacaactcaactccatcactgtccatagctcatcaatgatgactcatcttctacaacccaatggtgccatcatctttcatcgtccaccatccaacaccatcatcttccaccatccaataacagtgccactgctaccacccactgctggtaactcactaccttctgccgtcccgagttccacccaacaccatcatcttccatcatccaccaccatcccctcttggtaactcatccttaaccattcagtgatggcatcttccactgactgtcttcattccccactactcaaccattcctctttgcagtctcctttcctaccacccagtggtgccatccaaccacatcattctctgccatcttccatccttcacaactcaatggtgccattttccaccatccatcactaacaattcatcactctccaccatccaagggtaccatcttccactgacattctccattccccatcatctgccttgttctaatcccatcctccaccatcaaaatggtgccatccaaaattgttatcctctgccaccatttgccatccaatgtaccatctttccctgatgttttacattttctaaaatctcctttcccaaccccatcttcctcaatcttgtaccacccattggtttataccattgactattgtttactgtcctttcttagtcctagtatttcccattgattttctccaccccctgctggccaaacatttgcccttctccaattctgtcttcctccatccatcactgataaagcatcacccttcactgacccaaactaccacattccactgacattctccatcctgttatgcgaatgttcttctctccaattccagattccacccctccaagggcaccatcttgcactgctcacagcacaatgcccggtgattgctgttcattcagcagccttcaccatcctttggcatcatcttggccaacattccccatcctctatcatcccctcactgcgttctctaccatcgtcgatcttccaccactaactttgatcctttgtcacccaacagggccaccttccactatgagtcttcatctgttgccacctaatacctggcctttctccctccacctgacactgcagtccttcattgagccaacaccatccatactcatctctcctcacccaacggtgccagtccccaccatctgactctccttgtccaccgtctaccacccctcaccctcaatccctcaagtccctttcagccctttaacatcatcctccacaggtggctgcttccagaggaaagccccattcacttccttgaatatcatcccctggggccatgttccctagtgagtggagacactgcagggtcagcacagagataagaccctctcttccacctatgtggcagtagaagcaagtggccaactggtcagctgacacttctcctgattcccaatgcttatgcctaacccttggcctttgtatccatcaccaaccagggcagccctttccagatcactaaggctccagcccctcccgccagtctgtctcttcactcacccgggcatctgtgaccttgaactctcgcaggatatactgaggcatgttgtattctgccatcggatctaccacaaagtactggtagcgggcagagcgctcggccggccagtactggtgacacttctcctgtggaggagatggcggccgtggtcagcgctgtctgagccacagtctggccctcgcccttccctgctgtggcccctagctcacccggcccatctcccgcagcttggtcagcatcaccacgatcgtcgaattgttctcccacagcatgcgccagaagtcttccgtggtctccgccagcggcccctgtgtcgcgatgtaggccttctgctgcctgcaggcgttgggggtatgagcccagggccggcagggagacccggcgtggtactcacctgatgctgcccgggagggtcaggaccaagccagtgacagctacacctaccaccccactgcctgccaggaatggctgctgggtgcaccacttcccctcctggtgatcccattttgcatgtggggaaaccaccagtctcatgacaaattcaaatcccttgacaaagctgcgggactatccactaacctctcctgatttcttccctccatctccttcaagggccactgccctactttcagttgcttgcgtgggccaagctctcagccccgggcctttgcacatgtggcaccctctgccaggaacaccctcccctcctttgccaggatttctcaatctcagtgctattgacatttggcgctggattgttctctgagacaagctgttctgtgtactgtaggatgctgagcagcatgcctggtccccacccaggcagtaccagtagtactcatgaaaataagaaatatcctcagggtgtcagaattaccccaattgagaaccactgatagaacagatggaatcacattatggacagcagccatcagttaaacacacacccaaagattcacggacagcagccatcagttaaatatacatctaaagatgtgtatttaaacagctcagggctaccagtatctccccagctctgtctcccacaagactggaggcctcttgagagtagagatgggctccttctggggccctgaggtgggaaaggcatggcacctacctgtagccatcaatgaagctggcgttgatgtagtcagagccctccacaccccggatgggttgcagacagacccgtgtgctctcatagggcatgatgttcaccaggcggttcttgaacttgttacaaggcagattggcactgatgaagcgtgacgtgtgggccttggagttagccagccgctgtggggaggaggaagccagaggccaccatcaggatgaggaaggctatgctttcagctggagcaccaatggtggataggtaggtaggggcaccctgccaccaccttctagtccccattgctcgaggcgggcctgattttcggctctttgggcctcctccccaccccgcccacagcagcctccaccccgctggcaccttgaactcgagttccatgccagtgacgtgttcgccaggctccacctgggccagcttctggatgtaggcatagaggctgcgtgcgggcacttctgtgttgccacagcccacggcctccagcagggcctcgtggatgaagctgtactggtcctccgtctgcaccatgtagttgcgctgggacctcatgagcgtcacgtggccatagacatcgactgtcttctctggcttgatccgctcaagcatggcgtcgatgacgataaagcagcctgtgcggcccacaccggcactgcagggacagccacgtggcgttcaggggctgctgggctgcggggaccggggggaagcggatggggcagagtggggtggacgtacctgcagtgaaccacgatggggccggcatctggcgggttgcaggtcttgactctccgcaggaaagccaggaagggcgttgggtattcgggcacgccatggtccggccacgccgtaaactggaactggcggacctcgcgtttctcactggagccattctggggaccacaaggatgtcacctgtcactccggctcaacctgccacccatgtgctgaagatgcccaagtggccgggtgtggtggctcatgcctgttatcccagcactttgggaggccgaggtgggcggatcacctgaggtcaggagttcgagaccagcctgaccaacatggagaaacctcgtctcaactaaaaatacaaaattagctaggcatggtggtgcatgcctgtaatctcagctacttgggaggctgaggcaggagaattgcttgaacctgggaggtggagattgcagtgagctgagatggcgccactgtactccagcctgggtgacagagtgaaactccatctcaaaaaaaaaaacacccatgtctgcgcctcccagtcaccatgtccccaagtgcctgacttgggctctagctggccctggacggtttccaagtagagtcttgcggacgcctcacacacaacgtggccaactgtatctggccttctccccaaacctgctcccccgtcttagctgaaggtggctccaaccttctgggcactctggccacagcttgggagtcacccttaactcttcccctctcacatccaacacctcacccgggactgtcggctctgccttcaaagtctatcccaatccacctgctccatgttctccatgcaggccaatctggtctagacctatcaccaccctctttgccgcagaccttggctcccacccaagccccccagtctgtcctccctgcagcagccagagggcacctgagtcagatctggtacctcctctgcccacagccctccatggctcctgcctcccacagggtcaaagccaaagtcttccccaaggcccacaggatcctgcatgaccaggcacggtcctgccccagggcctctgcccaggctgcaccctcttacctgaaatgctgtccccccaaatctccccatcataccctcttccaggtccctaacactgtttttctcctccactttatttttctcctttgacatgtaagctttcttgacatttcatagttgtggtctgtgtcttgtctactagactgttaaatcccccaagggcagaacgttttgtctgtttaggtccctgttgtgtgcttgtgtccaggttagggagtgagatataacatatgcttaatgtataacatatgcttaatgtgtgtgattgaaccaagaattctcactcttgtccatgtactcagttttctggcacttaggtcaagcaggtgcctgacggtgagatgacctggctgggtgttggggatacatcacggtgccagtagcacctcccctccccatcatgacaataacaaatgtctcctggatggcagaattgtcctaattcagaaccacagatggagaaaaacagatggaaccgcactatggacagcagccatcagttaaatacatatctaaaagatcttctccatcccagtcctgactttgcagggctgccaatatctgtccatctctgtctggagactccttgaaggcagggctggggccctgctgaggcccccatcataggctcaagctgggtgaggccagaggacaagtgggcaaagaggacctggggcatgagtaaaggcaagaagaaatcaggctcattgctgagttgggctctgccggctttgttctcctgccgtgggtggaaacaagcagtgtcctctctgagcctcagtttccccctccacggaagtgggttccatgagaatgtagtcagcctgggtagacacgctccgctttctctctgtcccatggggagctccctgggtagaagctggggccctctgcctcccttccaacacattcctccaccctcagcccccagccccagcctgggccccaccttgtgcagagagaatgtcctgacgcagaatgtggccagctcgatggtatctagcaacgtgacctggatgaagccgtaggtctccgtgcctctgttgggccaatactgatcacacttgatctgtatcgggcaagagaacaggtgtcagcagggacaggctgactggcaggggcttgagggccgtggggtccaaggctcacccgtgacttctcctccagccgcgtcatcatgacgatggtcgccgaccgctgctcccacaccatacgccagaagtccccaaaggtctcaggcagcggcccctgcgtggcaatgtacgcgttctgacaccggtagccgtccacgtagttggcattgatgtaatcactgcccatgatgcctgcagccagggcgagaggccagggatctgtgggggctgtcttgctagtttggctctgtgtggccaaccacttcctggaagttcactctgaccgctcccagattgtccccaaggtgaccatgggacgtgtacttcacagtttctccccctcagcgccatcaccatttggggccagatcgccctctgtggcggggccattctgggcactgcagggtgctgagcagcatccctggcctccgcccactccacgccagcaacatttcttcccttcaagttgtgacaaccaaagatgtccctggacattgccagatgtcccctgggcagcaaaactgctctgattggtcacaactgatgcagaaggacagatgaagccatgttagagagagcagccatcagttaaatacatatctaaagatgcccagtggcctccagttggagctggaccaggtctatgaccagaatcaggcctcagtggcccaaggggagacatgggatctagcactttccatgcagtggggaagggcaggttaagacccgggatctccgaactaccttcaatgggctggaggatgacacgggagtggtcataggcgatgacgttggcatagcggttcttcggcttgttcacttccaggttggaatgttcccatgtgaactgctgtccagggtcgatggactacagaggaaggggagagcgcgggtgtcagggtaggtgcctgtgaggccgaggtgatgagggtgggaggcgggggtgggctcacctcatactcctgggagagcttgaggctgtcgttggccttgagccgctccgtgtgctccgccatgtctgcgatgggaattggcgggtggctaagcatgcctacagggtggagcagaccccgccggggttggtcacttggggggccagccggggactcgggggaggggggtgatctacgtgtgagtctgcgatgggtgagctgtggttagaagggcatggccggggtggggcttggcaggaggggaagactcagggtggctcatgaaggggctgggaccccaggcctaggggactctaaaggcagcaggtttgaggccctctgctccgtgcagaggctgacacccctggaggggcctggatcacagcattggcccatcctgtttccttccaaccaagctgggggtgcaggggctggcagaagggtcaccccagaggatgtcaagctcccagtgcctcgagccaagaagcaagtgtgtggcacagaaattaaattgcagacgcagccggctgtgctttggaaatactgtccttgggtgggcgactgacacccctttctgtccctctgggatcagaggcacgaaatccgcttccaggtagaggcgacagactagggaggggaaacagtatgtgtgtgtgtacgtgagaggagtgaggggtccccatctgtccctgcgcttgcttggggcaggagcaggtgcaagaaggccctggcctgagagctcttatcctttcaagccccctaggatggctgccgaaggtgctgggtgtgggctcggttctcccttcccgatatctgggtctgcagaaccctgacctctcctgggacctgtgtaccggatgttcagctctcaggtggtttccagaccagctggtaacatttaatgttctgagacttccatgtgtccctagctgtcctgggtgccccccaagagctcacatctaaggggcctgcctgtcctgtgggcacgtcctgggtacatacgtgcctcacccacatccctgacacacacatacacaccacacacacagcagtcacacacagccacctgagggcccaatggaccaaccccctgccctcttccaggagccagcacaagacaggtgggcaaaggccggtgatgggtgggcgtgtggacagagacaggagacacgatggagaaaccaaagaggaaatgaacgggggcgggggcgaaaggaagccaaaaacagacacaagaactaactttcaaagtgaaaccccggctccctgagggggctcctgaggcctgaatctgcaaacagcaaacaataaataaatgaaaacatgcagggggtaggggggggtcccacctctgcctcccccacccctcactggctggcggatgcaaagggcagagcaacgcggacaacggggggtatgtacagccacctgggcccccacctgaggactcacgatagctgctaactgtgtacccctctggctggacaccagtcaatcctggtcttgacccgtcactctggaaggactccaaagtgctaggttcttctgtctacagatcccctcccccagaccagcctggccttgggtcccctctgttgaggtcagcagagggcattctgaggaaggaggatgcaggatggtgaaggagaagctgggggagcagggaaaggacatatgggcccatgccatgagcttcaaggaggacagcaaccatcagttaaatgcacatgttgaaaatccttatttggatggaaacacaacagacatcagctagtccagagacagaaatgagatgggagcacattagcggtgaattgtgagactctgcatgatcccttcaggagactgcagccgtcagttacatgcacatttaaaattctcatttggctgaaaaaccaaagcaacacgaatcagtacagaggaaagaaagggaagagaatacacgaggggtgatacatgaggccctgcatgatccctttatgaggacagcagccatcagttaaatactaatggtcaaactcctcatttggatgaaaacagaagtgacacaagccagtccagagacaaaaaaaaagaaagtacatcaggaatggcatgtgaggctatgcatgaggctttaaggaggactaaagacatcagtgaaatacaaatgtttaaaatcttcatttggttggaaaatagagttgatatgaaccagttcagagatacgaagtggagaccgggtacagttggaaggacagatgtaacttggctgtgaacccataaggagaatagcagccatcagtaaaatgaaaaattccttatttggttagaagcagctggcatgagcccatgaagagggaggagatggtagagtttgtgaatcatacatgaaaatgatcaaggataaggccttgattcagttctcctggactgtcaggtgactttaatctacagggaactataaagaggcatgaaccctggcagccatggtgggaagaggtacagggcattgggcaggtataatttctgtaccttgctagggatatatcccaagggagtgtggaaaatggctgagggcaaacctcaactcccaccaccgaggaacattaaaaccagagacataaacagaagaatagctctttctgcccaaagaaatgaggggtttatttgtgttttctccattttttaaacatcgtctttaggctcctgaagaggacagcagccattggttaaatgttaactttaaaaaaaaaaaagcctcacttggttgtaagcagaaccaacctatgagttccaagcccagatccatgtagggttggaggtatttgggaatccagaatgtggctgcaccaagcatagttcagagggggccaatgaggggcccccagggtggcagctactgcttctccccagctatctcccctgttggtggcatccctggtaccagggataagtacatacctggagtctggaagttaatgcgtctcatttccacagggtccttggggtggtgaggggcgaggtcggcattgttcaggaggcatttggtgcggggttctgagtccttgcgtttactttaggagaagcaagcggaacagtccagttagtagtggcacatgttcatgtgtgaacacaattcaggccccaggaatgcatggtaagaaaaggaccatggacccgtatgactagggtttccaggaccaagtacagctacgtgtacaagctgtgggggcagccgggcatcccctctcctgtgggcacactatcagcccattccctgtcctcttcctcttgcctgaagcctccacgggggagggctggttcttacctgtcgggtttgctgttcccgaaagcagacacaggtgagaagggggaaaaaaagaagaaaggtgagggtgtgccggccatcaagggcttgttctgtgactctcagtgccttccttaacctctgtgagctttggtctcctctggaaaatggtgctcatatttcctgtttgtccccctgcctatcgacaccacaaggaggcttatctcagccctgggatgtgccccatggggccactacaattgctatcctcattgaactggacacaggcagcctctaccccaaatcttgctgagttgaagataggggttaagaggagaagccaagccactggcctgctttgagccctagctctgccattcccatgctgtgtgaccttgatcaagtggcttaacctctctgaacttcggtttccccatgtgtacaacagagacctttagtgatgattctctgagacaactcctccctccttttccaggaagccctccctgctgtcaagtcaagtcggggaggacatggggcttacttcttgtagagcaggatagcaatgacaatgcagattatgaagaccacggccagcacaggcccgatcacccagataagcccctcctcgccatccacgatgggctgggggtccgggttatccagctggaaggggtctgagaagggactggctgcaaaggtctgcagggaaaggaggggggtctccatcagtgtccaccctccttgtagtggccagatgggtctttctcaaacatgaacctacgtttctcccccgctctagatcctcctatattcctagaaccttgaccctggtggcctatgtgacctggtccctgccaatctttgctctccccattcccttctctgctccagccactctcctttctgtacctccagacctttgcacatgcaaatcctgggatgctttttctttgttgaactcctactcacccctcaacgccccagctccaaggtctcttcctctaagaaaccttcgtttcaggatccctccgctcccaagtcttcccctctgcccagctctgaccacagggagctgcctgtgactgaccacagaggtcagggccctggggaatggggtctgcctcattcagaggtgtgtctggatgtgggcggacaccattcaggacttacaggctcgctcttctgaagcacggcaagcacgaagaggacatagcggtggccgggctccaggccccggttatcgaagccgccatactgcttctggtcgccgggatggaacgtgggtggcagcacagagaagcgagctgcaatatagggccggggcacctccagctgacgcgagtgccgcaggctgcgcctctgtagccgtgagatgtcctggatgagctgcgggaacagagtcatgggtggctcagagctcagctgggagcaacagagcacgtgaaaactggaatgcatctgggccctgcgggttgggccccaggccctcacctcttccagatccatgtcctctgggctacccagcggggtcaggaattggcctccacgagacttgcgcagtggcaccatcacaatgaaatagctcctgtagggagatgggaaagagtcagaggggctgtcgatagggatgaccaagggatgcttcatgggggcaaacgggggaagccgtttctctgagtcttcccttctgttcatacaatgagcctattcccctatgccccatccacaaacgccacagttgctgactcaggcctccaggccttggatgatgctgtactttctgcgtagaaggcttacttcatgtaatgctcattgttaaactcctatacatccttcaaagctccagcttcaatgcccacataaccttgtagcccttaaatcttctctgcctctgaggcagagtgctcctctccccactggggactctcagctttgcctccccactagttgggaagcccagaaccaaatcctttcaggggccctagtaatacccagtggagggtcaggcatatggggtatcaggaaatgctagaagagcagacacaggacacatttagtgacaatgacccatgagaagcattgaatcttggatgaccccatgaactagggctgatagggtctgtgtttcataggcaaggaaattgaggcacagagagggcacgtggcttgccccagccatatagtaggctgatgggggtgacaaggaacccggagcatgggggtgagcatactggacaggcacggggctctggccgtcaggaagatacaccatgatgaagccgtcagcatcaggcttgggggcgacgctgggcttgccgttgagcaggttgaaggcagtccaggcggtgaccgtctgctggaggccgcccaggctgctgccgcgattggtcagcacaaagttgtagaaggtgtggggcttgaggtgcgtgatgagcttcttggtggtacggccatccacatccagtgtgagcccattgtactggatctgcggaccagggctagctcagcagggcctggtgggctcatgcccatggactgagccccagctccaggatgagtcccccaccctgactgagccctgatcccactgaatcctgccctaggcagaaatctaacactgactgatccctgatcccaggctgagtccccaactctgactgagccccaacctcactgaaccctgaccccagactgtgcctaaattccagctgagtcctgatcctaggtagaagcccactttgactgagccctgatcccatgctgaattcccagtcccgactgagccccaatcccactgaaccctgaacccagactgatcctgaattccagctgagcgctgaccctaggtggaaacccacctctgagacctgatcctagactgattcctgatctcagactgaacctcaatcccaggctgacccccgatcccagacttggcaccaactccagactaaactctgacctcaggctaagtaccaactctgagtcccaatcctgattatgcctcagtcccagctaagccatgatctaaggctgagccccaactctgatttccaatatggactaaatcttaatcccagactgaacctcaatcccagctaagccacaatccaaggctgagcccaacattgatccccaatattgactgaacctcagttccagctgatctccaatcctaggctgggccccaagtctgattcccagtattgactaagcctcaatcctagctgagacccatctctgactgagccctgatccctcacttcacaccaactccaaactgagccttaagccctgctgaactacaacccctgaccctgcctgcctgcctgcctgctggctgggcagtcgcaccttgtagggtgtgggtgagttgtagttgtcagggaactcccagctgagcagaactgatgtcttcatgatcattttcaccttgaagttcttgggcgagactgccggggaggcggccgagcagggagagagcagaagagaggccccatgagtgcctggcactgggtggcgtgaagcggggtggggtggggcggcccaggcgctccctgtcgtccgctgtgcccatgcccacggccttcctgcctggccctggcccggccctgccctgtcctgtcccaagtccctgcttcgggagacggcacgggtgcagaggctgcagaaagaaggtggaggaggaggaagaggggggaggggagcaaggggagggggcagtggtggggggcggtggtgccaccgaggcacgtcccacctttgccaacgccggagcctcggggtccggacttgccttgagtgaccacgaggaagcagaaaagtgagcacttacctgggcaggggagagggagggggctggggtgggggtgggcgcaaggcccggtccggctctggtgcaggggtcgccgcgcgcctaccttggtcccgcaggaacgtccggtagcggacgggggggctgaaggggccagggccccggcgcgtgtgggctcgcacttggaggtcataggccgtgtcgggcttcaggccctgcagcgtgagcgcgttctccgcgcccggctcagccgctgccggcagctcagtctctcgggcagggcccagggcaccggcctcccgcacggccaccgtgtatttgacgatggccccgttgcgctcggcgggcacgggtggcagccagcggagaaggacggtcccggccgaggcgttgccggccgcctccagaatctgcgggtggccacggggcgtgtcctccgggatgctcaggacctcggctgcctcctcgcccaggccgccgcggctccgggccgcaagccggaacacatacgtggcccccttgtgcacgcctgatgccgtgtagcggtcctcggagggcgggaactccagggtggccaggggcgtcgagtcctcacggccaaactgcaggcggtagcccagcacctggtcctccgcggtgccagccgggggctcccagcgtgccagcaggctgccctcgggggtctgctgcaccgacagggttgggcggcccagcactgcggggatacggggcaggtgtcagggtcccagcgccatccgccagcccagaggcacaaggtggggttgtatttttaattcttttccttcaatataacatttttttgagttggggggggtcttactctgttgcccagcctggagtgcaatggtgagatcacggctcactgcagcctcgaactcctgggctcaagtgagcttcctgcctcggcctcccaaagtgctaggattataaggccactgcacccagctgcggttgtgattttttttttttttttttttgagacagaatcttgctctgttgcccaggctgaagtgcagtagccccatctcggctcactacaagctctgcctcccgggttcaagggattctcctgcctcagcctcccgagcagctgggattacaggtacacaccaccacgcctgggtaattttgtatttttagtagagatggggtttcgccatattggccaggctggtcttgaactcctgacctcaggtgatccacccgcctcagcctcccaaagtgctgggattacaggtgtgagccaccgtgcccagcctggggttgtgatttttaaaagtggatctcaaggctgggtgtggtggctcacatctgtaagtaatcccagcactttgggaggctgagatgggcagatcatttcaggtcaggagttcgagaccagcctggccaacatggtgaaaccctgtctctactaaaaatacaaaaatgagccgggggtggtggtgcacgcctgtaatcccagctactcaggaggctgtggcaggaaaatcacttgaacccaggaggcagaggttgcagggagccaagatcgtgccactgcactccagcccgggcaacagagcaagactccgtcttaaaaataaaagtaggtctcaagaaagcctcacttaagaagcaaagacttgaaagaagaaagagagggaaccacgagaagatctgggggaatcgtgctccaggaagagggaacggcccatgcaaaggtgtagagccggcactgggctaggggcgcataaagcacagcaaggaagtgaggactcagagaacccctcctccttccattaataaggcaaccatctcctgccttgttgatttggcccttgctcaatgcaggcacctgaccaatacccatgggacataaagaaatccaaaatccgcccctgctctttgtttcgcacagcctgggtagtaatcaatgtgccgagagaggttctgggatcaggcaaagaagggggaaagctgggctgtatacatgaaaatggacttctctactgcaggacttatcagggccttgaatggactgctatgaatacccagggtggtggggagagcagcgtatgcagtggtttctgcttagcaaacacagctctaatacaatgtccctgagagaggagggaagtgccctgctggctagaagaagggagggagagatcacaggaggctgcttggaggaggtggcgttagagctggatgctggaggacgcagacaaggtgcgtgaagggaatagtgtggacaagggcaggggctgtgtccagctgggaggcctgaaaggtggggtacacagtggtgtggctacaagggtccccgaggagagggtgggtgtggggactgggatgaaggccacagaagtcagtcgattgttcctgaaacacccgagcttgttccgcccaccaccaccaccaccacgccccaccccccaagtctttttctgggctgtgccctccgcccggtgtaccctccccttacatcttcacggcagcctctttttcttaattcagctccattttggctggaaaaaaaagccagccccttggggacgatggaagggacaatggaggggctagaaggggaaactgaggcagggccaccaagagaaaggtggcttcctggtgcagtaggggaagacaggtgcaccaccctgaaataacaacctagccggggcgaccagagcctggatgggggaagcacaggagactagggggcccagaaggatcaagattatgggatgaggcaatcagggaaggctttccagggccaggtgtaccttgagctgagacctaaaggcagaagaggagccagccagcaggggaaggggtatcctggcagagggaacagcccaagtaaaggttgagagggcaaaggggtcagaggtggctgttaactgtttctgtctggtgggagccggggggacaggaagtgagtgacaaaggaggaggcaggggcggggggggccaagctgggccctggacacccacctgagcagccctcacacctttgtctcactgttccagctgcctggtgcaccctctgcctgcccttgtgagctcaaggactctggagtcacgctctggtgccagtgggggcaaaggggctgttggtgggtgggaggagggcgggttgcatacctgctcccttggtcacaaccaccttgggtttgctgcgagcgccatcgcccttcatggtgtaggcggctaccgtgatggagtacgcggtctcaggctgcaagtttgtgatgaccatctcctgcaggcacggctgggggtcagcacgacggctggggctgggagcagccccacccacccccactccccgtgctgagaacaagcaaggaggatgcagggcccggatcaggggtggagacgtgcacatgagctcatgcagagaccacgacacgtggcatggccatgctcagagggtacatgcaacaacccagccggacgagcccattgtcgcttgccaggaccaactcggtcctctctgctccgctcccctcactccttgccatcacccccgacagtctgtcctccccacagcagccagagggcgcctgtgagcactggagtcagggtccgtccccgctctccccacagccctccatggctcccacctctcttggggtcaaagcccaagtcttccctgtggctcacaaagggctctccttgctgttcctccaatgcaccaggcacagcctgcctcaggccctttggcactggccttcccccctgtctacacccactggtgtgctggaggtgcccggtaccaactcatgagagccgctggttaaattttcaggaattttgtgagccacttatgaaacagagctgttattaaaaattaaactgtacgaggctgggcgcagtggctgacgcctgtaatcccagcactttgggaggccaaggcaggaggatcacttaaggtcaggagttccagaccagcctggccaacatggtgaaacttcgtctctactaaaaataccaaaaaaaaaaaaaaaaagcaaaaaagccaggcgtggtggcacatgcctgtagtcccagctactggggtggctgaggcaggaggatcacttgaacccaggaggcggaggttgcagtgagccaacatcgtggcactgtactccagcctgggtgacagagcaagactgtctcaaaaataaataaataaactgtataaacttacaatcaactaagttatattgaaagcaaaggcaataaatacagcaaatctagttatttcactagggttactgttctctgtgggtatctgtatggttactgctttgagatcatcttgtctattgcatctgtagagtaggaatacatgattatgggctactgggcacctccccggtagcttgaaattgacatggtgggaagtatttacaccatggaaacggtccaatgctacaaaacaggactgccccctcctgcccacccagagagctgatttttactcttttatcttattgagacagggtctcaccctgtcgcccaggctggagtgcagggtgtaatcatagctcactgcagccttgacctcctgagctcaagtgatcctcccgccttagcctcccaagtagctgggaatacagacgtgcaccaccacatgcctggctaatgatgtttatattttttgtagagatgggatcttgccat[136 bp omitted]ccatccccaccacagctgtaacaatttttttttttttttttggacatagagtttcgctcttgttgcccaggctggagtgcaatggcatggtctcagctcactgcaacctctgcctccctagttcaagcaattctcctgcctcagcctcccgagtagctaggattacaggcatgcgccaccacgcctggttttgtatttttagtagagacagggtttcaccat[138 bp omitted]atgactgttagggaggaggggctcttgtcaccaccacatcctcagcatctagcacatagtaggtgctcaataagtgagtgctcgtccaatgaatgacagcacagaacactcccgggcacgcggacttgcacaacacctgtgcacacgatcacagcatcatgtgtgcccatgtctgcaagcacacacgcacccccccaagcacaggccggcatgcctgggaactgtggggtagacccaggccaaggggataaggaggggtgacggggatgcacaaacagggtctcctacccctgagcctcacagtccatccctcccagggtctctgcgagaagagcagagttgaagcccaggtgggaacattccctctagatccagtgtgggtgagagatgggaggcatcagagcatgtgggaccagtgcctgtttgtttgtttattagagacaggatcagccaggaccagtggctcatgcctgtaatcccagccactcgggaggctgagacaggagaattgtttgaacccaggaggtggaggttgcagtgagccgagatggcgccactgtactccagcccgggcgatagtgtgagactccgtctggagaaaaaaaaaaaaaaaagagacagggtctccctctgctgaccaggctggaccgcagtggtgccattttggctcactgcaacctctgcctcccaggttcaaacgattctcctgcctcagcctcccgagtagctggaattacaggtgcctgccaccacaccaggctgtttcgtattattagtagagaaggggttttgccctgttggccaggctggtcttgaactcctgacctcaggtgagccacctgcctcaacctcccaaagtgctgggactacaggcatgagccaccacgcccagccaagggaccagtgccaatttaatgtcagacctggggttctcagcagagactggtactcccgttttaggggcagagaggtagtccagagagaggtagcaacttgccccaagtcacacagcaattcctctctggtttaaagcattgtggggttgtaaccaggctatcacagacatccttccccactctggccccgctgacacctctcatcacccgggggccagaatgaagacgacagcatatccagagagaggcatttctaggccagacagggctgaattgagtgacagtaaagggtggggctgggtcaacaggagaggagacatactcacaggagaaatgactacgggcaggagaaggacccaggaggcttaagccccaccaatggcaggagccatcagggtgagaggattcagggacgaccctcaggtcctgttgctcaagccaccctcgggtctgccccctggggcgcacagtggtccgagtatcccatttccctggtgcaaacatcgaggctgggcgctccaagaggtaatgggagagcgaggggcgcatgggagggcccagaggaggagaccgttttactactgatgataaggggcgtgcaggagtcacagcacagcacggcccgcgggaagcgcacagcagtaggtgggtggccaggggcgctacttacatattcggccgtgtcatccgtctcccactgagcgcgggaggaggcggcaggggagagaggaggaaggtgagcgggggaggccagagatggagaaagagaagcagaggtggggggagcgcaagggcccgtccccgcccggagcccgtccccggccccgccccggccccccgcccacctgggcatcggccagcatgacgtccttgatgcgcggcggcccgcgggcctcggcgccctccatgcgcacgtagtggacctggtagccgcggatctggccgtgctgccggccgggcgcgggcgagcgccacagcacgcggatggccgtggcgttgagcgcctccgcctccaccttccgcggcggcgcgctgggcactggcgggcgggaggggaggggaggggcgggcggagccgttaccagggcgcccggccctgccccgggcagtgccactgtccgattccaggatgccgagtggctgccggtgaataactgggcgctcttagcgctcaccaccgggcgggaggacatggcctcctgcacaccccccacagccctgggaggggcccctgaaggtgcgccccatggatccaggctgcccccccccgagtctaaaccaccttcccagggcctccagacaccctcttcttcaccctacactgcttccatcctcatcataaccctgcaagatagggtctcctgtcattctcattttacatttggggaaattgaatcctagagagttgattctgtgatcacagccttagcaagaggcaaagccaggatttgcaccaggcagtccagctgtatgttcctaaatacccaagcaggcaggtggcccacttggcactcaggatctttttcacccaccccagggtttggcataaagaagagctgcttcatttcttctctgggcttaggacataatggggctgtccaacgaaacaaaggcaaatggctcagaaaacgaatcaggttcccaggaccaagaggctgaaatatttttgagacaggttctcttactctgtcacctaggctggcatgcagtggcaggatcacggctcactgcagctttgaactcctgggcttaagcgatcctcccacctcagcctcccaagtagctgcaactacaggcctgtgccaccatgctcagctaatacgtttttgtagagatggggtctcactctgtcacccaggctggagtgcaggggtatgatcacagctcattgcagcctcaaactgctatgcccagcaatccccgcacctcagcgtcttgagtagctgagactacatgtgcatgccaccatgcttggctatgttttaaaaatgtttttggaggaatggggtctcactatgttgcctaggctggtctcaaactccgagactcatatgatcctcctgccttggcctctcagagtgctgggattacaggcatgagccactgtgcttggccaagaagttgcaattttattgggaaaggtgtctgtcatttctctccatgatctaggcttcgaccacgtgactccaagctaggaccactgccttgctttccagcttcaaacttgctgctaacttgaaatgggtgaggacgggaacatttacaccatggaaattggccaatgctacacaaactggtctccatccacccggggagctggttaaccatgatcagcacattgttgttgcaggtgctatttgccacttcctccaccccatttccaaaggtttccactgttccaccaaaatagagggcagccagcgaaactgtccaggcacgaggctctgggagcagatgctgcagagctaagcctgcccatgtctagaatcgccaattccaaagtcaaggagccccggatttctcggggaggctgcttgcttcccgacttcctccgagtgaggcttccgccctttgaccaccagcccaggtttccagatggaaggcttcgaggcgggggccgggctggggcctgcggggggtcccgggcctggggcaggtacttaccatcctcgtcggtgcggacgaccacgggcgagctctcgggccctggtcccacctctgtgtgagcgacagtcgtgatgcggtactgggtccacttctccaaggcctccagcaggatctgagtggtggtcggggggatgccgttcacctccttgggttccgggtcctctgagcccagcggtcggtagcggacgctgtagcccaccagggccccgttgtgcgtttccggcggcggcgggcgccaacttaccaaaatggccgtggagcgcacgctgacacatttaacgtcttgagggggggctgacggttctattggagggggggagaacgtgggggggtggggaagggaggtgggatgggtggggaggggggcggggaaacaaaagatgggaaagagaaaataaaaaagaagatgataacaaacaaaacagaaccaaaccaaagagaagtcgaacccaaaagaagtgggtgtcaaccaaaggtgggatgggcgggtggatgggcgggcaggtgggatggggctgggagggctggccaagaaccctgtgctcaccaggctgcacctacgtggtgcacagtaggtcttaggcattggacagctatggtccccatgccagaaactgggtgggggaatagcaagggaagcccttcttactaggcacctactatgtgcttggcatcgtgccaaggggaatagcaacaggagctccatttattaggcacctactatgtgccagcaccaagggcttcacaaaatagtaaaagcatctatttgttgaacatctactatgtgccaggcaccatgccaaagggaacggcaacagaagctccacttattaggtacctactatgtgccagcaccaagggcttcacaaaataatagtaaaatatctatttactgaacacctactatgtgccaggcaccatgccaaggggaacagcaatagaagctccatttattaaaggcttattatgtgccaggtactgtgccaagggaaacagcaacagaagctccatttattaggcacctattatgtgccaggcaccataccaaggggaatggcagcagaagctctgtttattaggcacctcctatgtgccagcaacaagggcttcacaaatagtaaagcatctatttactcaacacctactatgtaccaggcaccatgccaaggggaacagcaatagaagctccatttattaagcacttattatgcgccaggtaccgtgccaaggggaacagcaacagaagctccatttattaggcacctactatgtgccaccataccaaggggaatggcaacagaagctccattcattaagcacctactatgtgccaggcatcatgccaaggggaatggcaacagaagccccattaggcacctactgtgtgccaggcaccatgccaaggggaatagccatagaagctccaattattaggcacctactaataattgtggtaaggcattgtgctgaggactccatagaatgatagcaaaataatctatatgtcaaacacttactatgtgccaggcaccgtggcaaggggaacagcaacagagctctattaagcacctacgatgtgccagcgccaagggcttcacaaaataacagtaaaagcatccatttattgaacacctagtatgtgcctggcgccatgccaaggggagcggcaacagaagctccatttattaagcacctactatatgccaggcaccacgccaagggaagcagcaacaaaagctccaattattgggtacctagtatgtgccaggaaccatgccaaggggaatggcaacagaagctccaattatcaggcacctactacgtgtcaagcattgtgctaaggcttcatagaatggtaacaaaataatctatgtcgaacacctatgtgccaggcaccgtggcaaggggaacagcaacagagctctattagacacctactatgtgccagcgccaagcacttcacgaaataatagtaaaagcatctatttattgaacacctactatgtgccaggtaccatgccaaggggaatggcaatagaagctccattaagcacctactacgtgccaggtaccatgccaaagggaacagcaacagaagctccatttattaactacctactatgtgccaggcactgtgccaaggggaatggcaacagaagctccattaggcacctactatgtgccagcaccaagggcttcacaaaataatagagcatctatttactgaatatctagtatgtgccacgcatcatgctaaggggaacagcaatagaagctccacttatcaggtacctactgtgtgtcaagcattgtgccaagg[131 bp omitted]tgaaactccgtctctactacaagatacaaaaaactagccgggcatggtggcgggagcctgtaatcccagctactcgggaggctgaggcaggagaatcacttgaacctgggaggcggaagttgcagtgagccaagatcgtgccactgtactccagcctgggcaacagggcaagactccatctccaaaaaaaaaaaaaaaaaaaaaaaaaaaaaaatctatatgtcacacactatgtgccaggcaacagcaatagaagccccaattattagctacctaccatgtgccaggtgtcatgccaagggcttcatacaataacagcaaatgcacttatttactggccacctactgtaggtcaggcatggtgccaagggcttcataataatttacggaaaatatggtaaaatttttcttgtagtaaaagcatttatttactgaacacttgtgctaccagggacccaaagcccatcccaaaagcttacttcaactaggaccatccaattggcctcacttgaaaataatgcccatgtcttgagcacctactgtgtgccagatagaatgtcaagggctttatcaagtaataataaaagtgcctgtttattggacacctactggtgtcaggtaccaggctcaggacttcatagctcatattgagcacctactgtgtgccaaaatctttaaagatcacagcacttctgtgttcagtcccaactatgcacctggcaccacactacatctactactaacctatcaacagcaagtctcatttattgaacatctactatggactgggtacggtaacaggtctctgaagagaaaaacagcagttgtcatttaagcagcacctactatgtgccaggcactgtgccaaaggctctctcagaaaacagtagtagtccctgcatattaaacccctactgcgtgccaggcactgtgctaagggctgtatcagaaaagttaatagtccccatgtattaggcccctactgtgtgccaggcactgtgttaaaggcttcatcagaaaacgatagtagtcaccacatattaagcacctattgtgtgccaggtgctgtgctggggcttactgaaaaacagtaagtttccacatatgaagcacctactatgtgtcaggcaactctactaagggccttacggaatgtta[137 bp omitted]gcctcccgagtagctgggactacaggcgcccgccaccac[172 bp omitted]gtgccaagcatcgtgctaagggctttattggataactgtaacagcacctggcaccgtgtgccaggcattgcactcaataccttatataaaaatagtaatagttcttattgagcacctactatttgcacacactgtgccaagggctttgcagataataagtgaatgttttcagtaaaaactgtgtaaccagccctatcccacaccctttcaaactgataatggtgcccatctgagcatctactacgtgcctcacacttaggccacctctttatagcaagtgccacttattgagcacttactgtatgtcagccattgtgccaagaggtttgcagaacaataattgttgccacccatgttttgagtacctactgtgcgcctggcactaggctaagcttgttataaactgctaatagcttccatttactgagtgccaactaggtgcccagcactgtgccaatccatatgtagatttaaaacagtggctgtattaatggggcacctactgtgtgccaggcagtatgttaaggtctttgctgaataacactgagagttcccgcatattaaagggaactgtctgtgtgttaaaggcttatgaatcagtaagtctctatgtgttgcgtgcctactatggccagacgctgtgctgagggcattagtgataataaacttcattttctgcacgcctactgcaggtgcagcaccctcagcccatgtttcatgtattatctcatttaacgcatgtatcatctcatttaatgcatgcattatctcatttaattctcacaacccctcaggtggtcagaactgtcactccccacccgccaccccgcgtcaacggtggggaaaccagattccaaagtctgcctgctgggctttctacagtcactggttgtgtaccgactgtggccagaccccaccctggaagcttttcattattttgtataacacctctcaatcttgccgaaaaaccagaagtgcagcccattttacaggtgagcccattttacaggtgaggaaactgaggctcagaaacagcaagctacctgtccaggggcatgcagtgatgaggtggcagagccaggattggaacccagacttggccgtgattcacaggctggcttggtttgaggttggcagctcagatctcagccttgtgctggttgggtatggcggaagccactctcccaagtgcccacgattttagaatctacgtcccctggagggaggcccagagagattactggccttgctcgtggcaagagcattagaaaccctcaccatcagagcagcttgcttggtggctgagcacatgtttactgagtacttactatggacactatcctgctagcatctgaaacccagagacgaatcctgtcctcagagacactgggctaccagagactgcagaggccaccccaacagcttacttcaactagagagaccctccggcctcacttaaagcaaaacattagaggcccctcctccaaaactagacaaagggaacccttccccatttcttgaccagccacaccaaccaaaggtgcccggggggtgcggggaatcaggcagggagcagggggaaaaaaaaaaaaaaaacaacaatcaaggaatgtgtcggaaggaatggatttgctgagaaagggggagaaaaaataaaaccgaaaccataataaaataagaaacaacagtgatggtgatgatgatgagaaaaacttaataaaagaaagaaagactccttccagaaaacgcccagtctggttacctaccttccactcttcaactgctaacttaaaagactttcttacgagagagggaacggccgagcgctgagctacaaggccagaccgaactcttggtgggtctcaggatgccagtggccccgcagccctgctccagcccccagcgtgcgcacgctgaggttccaggctggaggcaggaaggtggcacggtgtctggggagacccacggctgagtggtctgacctgcacctaccctgtgttcagcctaaggagcccgcagtccccggggggatggatacgcctggccctgagtctttgctgtcggttctcctgggccccacccgtctcggggcaagaagcggggagtcccttctccccaactccctgtcctgggccgccccggaggttcgcgtggctgggccgaagccgctttctaggtgaccgtgtaggtcacgtccttcacaatccggcccaacctgcatgacatctcgggaagggatgtgtgcaaagacgtggatgtgcgtgcgtgggcagcgtggcatggtggtggcacgtggtttgggagagtttctggggccgaattcgggccgtggactgtccgttcagcccagagtggctggggcaggcgggggggcacgcggggtgggccgtttttgtgaacctgcttgagaccagcgtgtactcaccttcaggacacctcagccagtctctcaggtggctgcccaagccacaggccaccctcactgactccacctcacacagacgcgcccagacgccttggagccgccaggtgctcagctcggcttggtttgtggggagcaggaaggagggaagggggccggcgggggcaggggggttgtgtctccgaggcgccccacccccccgatcccagcggctcagatgccccggctggagttgatgttaacccttcgactgatccgagatgcccctgtgtacacacacccagggcgggccttgaaggtttgaccatcatgactgattctggaagaaagcctggggtggctacgccgtgactgactgggtgaagggagggaagagggggaagcagggggaggccacgacagagagaccacgccggtggaggccacaccagggaaggccacgctgggctgagcggagccagggaggcaggtgaggtggggagacggcagaaggggcctgtccagctccgagtttagagaagtcagggagagagggtggcggtgacccacagccaactgccaggtgaagggtgactcgctccaaacagggaggccgggccggcacagcagagaactccagagatttgagccccgagtggggacctgcatgcccccacgaaacctggcctcggctccgattccaccccctccccaccctcgggaactgggacctcgtcctggggtcttgagagccaaggctccctgcccgggggaggaagaccgacggggaaggtgggttcgtctctgtgtcctttgctctgagaatgatggggtgcgagccgtgaccacagcctcacggtaccctcaaaatgcctgggaaatgggcacaacgtggcccttcaatcagcccccactccaggatggaaagaggagaaagaaggcgtggtcccagaacctctcctacaccagggccaagatcagccacttctccttgaccccaagtctcaacccgggtcaccaggcccaggggcacagacaaccccatgctgagaccctcgctgtgctgatggggatactgaggcacagcgcgggtagatggatccgaggtcggggaacaaagcggagacaggccgggaggcgccccccacccactgcagcaggccccgcctgggtccgtctgccgaggggctgtctgcggtcaggccgtggtccctcccgcagagaagggcggccccgcgagacacctactggactgcagcgtgcgctgccgcaccacgggggtgaaggcgcccaggccctgcggcgagcgggccgccaggcggaaggcgtactccgtgttgggcttcaggtcctccaccacgtaggaagtcgtcgggtcgaaggtccttcccacctgggggcagggcagagaaggacagagagggatgggggagagagagagagagacagaaacaaaggggagagagagagagacagaaacagaggggggagggggagagagagagagagagagagagacagagaaatagagacaggggtgcggcagagagggacagagagggatgagggagagaggtagaggggagagagaggtagagacagagatacagacagaaaaagagggtacggagagagacagagacggagagagacagagacagagagaaacaggggagagagtcagagacagagggacacagagacagagatagagacagagggacacagtgacagagatagagacagagaaacaaaggagagagacagacacagagacagagataaatgggagagacagagacagagagagatacagagacagacagaaacaggagagagatacagagacagaggaatagagaaattgagaaggagacagatacagagatagacacacagagacagagaaatagagacagagacagaaacacagagaaacaggggagagagacagacagaaacggaggagagagagattgagacagggacagagaaagagaggagagagagacagaaatagagatagagacagaaatagagagagaggagaaagaaacagatacagagacagagacagagagacagaaagagaggcagagggatagaaacacagagacagatggagacagaaaaaaaacacacagaaaacagagacagaaagagaaacagagacagagacataaacagacagaaacagacccggagggatggagagtgagcgtcagaggcaccggtgaagacaagacacagagagaagcacagatcaagagagatggggacgccgatacatacggaaccagagagaggccgccagcagcagaggagaaagacaaaggagatgagacagaggagaaaaaagtggaggaaaggcacaaagggacagagacgcaggagaagcagaaggggtgaggaagagcagaatccgcagcacacatagggacaaagagggggaagagacaaggcgggcagcgtcagagagcgccggggaggagcccagggcaggccagcccgtccccgcgctgcctcacctcccggccatggtcgccttcccggaagaggagctcgtacttgatgatactctcctgccgcggggggctccaggacagcgtgatgctggtctccgacctggcctcggcccgcaggttcatgggctggcccggcactgtgggggtgcagggagacaactaggagtcggggagcgtccaccccacaaagggggccccacctgctgagtgtccccactaaaagatgccagctctgggtgcttctagaatgttcttttattttcctggggacctcgcccccatcccattgtcacctgtccacctctgttcctccatcctctc[131 bp omitted]gctaacatggtgaaacctcgtctctactaaaaatacaaaaaattagccgggcgcggtggcgggcacctgtagtcccagctactcgggaggctgaggcaggagaatggtgcgaacccgggaggcggagcttgcagtcagcggagatcgcgccactgcactccagcctgggcaacagagtgagactctgtctcaaaaataaataaataaataaataaaaataaaaaaaataaaaatccccttcattttttttttttttttttgagatggagtctcactctgtcacccaggctggagtgcaatggcacgatctcggctcactgcaacctccgcctccagggttcaagtgattcacctgccttagcctcccaagtagctgggattacaggcacccgccaccacgcccggctaacttttgtatttttagtagagacgggatttcaccaattggccaggctggtctcaaactcctgacctcaactgatcctcctgcctcggcctcccaaagtgctggaattacaggcgcgaaccaccacacctggcctaaaaatctccctttcaaatcaccccagtgccctcgctggctgcgaattagatgacagagaaattagcagggagatatgtgtgcctattttatttcattttattttagtttttgaaacggggtctcactgtgtcacctaggctggagtgtagtggcacgatcatagctcactacagcctccaacttctgggctcaggtgatcctctcgcctcaccctcctaagtagctgggaccacaggcacacaccaccacactcagctaattttaaaattttttgtacacatgaggtcttgctatgttgcccaggctggtcttgaactcctggcttcaggcaaacctcctgcctcagcctcccaaagtgtcaggattacaggtgtgagccacagtgcctggcaaagggtgcctattttaacatttggatctccattctgtatccgctcacagacatggacagagtgccaaccgtcccggccctttgcttcagtgggtgcctgagtctgcccagactttaggttttgaaagcctgagccccaaaggaaagggtcaaacactcccagagagctggggtcccccatgcctaaatgcctcttccaagtcctgccacctgagcagggagggagactggcccactgccttaggggtgaggcagttttcttttatttttgagacagagtttcgctcttgttgcccagactggagtgcagtggcacgatctcagctcaccacaacctccgcttcctgggtccaagtgattcacctgcctcagcctcttgagtagctgggattacagacacacgctatcatgcccggctaattttgtatttttggtagagatggggtttcaccattattggccaggctggtcttgaactcctgacctcgtgatccacctgcctcagcctcccaacgtgctgggattacaggcgtgggccaccacgctgagccagcagttttcattatttcagaagcagtggcgctggtccctctaatgagaacagatgagggaggttcttaaaactcaaatgccaacaggggtgaggagttaacagagaagagggaaggaagcacacacagccccccttgtctcccacacagccactgggatctacccgggtgtttgatcttagccctatgggcttgtcaaatcagattttttaaagggaagccaaaaatttggctaggataactgtccaattttattttttttgagcagggtctcgctctgttgcccaggctggagggcagtggtgacattttggctcaccgcctcccgagttcaagtgattctcctgcctcagcctcctgagtagctggaactacaggcgtgtgccaccacgactggctaatttttgtattttttttttttttttagtagagatgaggttttgtcatgttggccaggctgttctcaaactcctgacctcaggtgatccacccgcctcagcctcctgaagtgctgggatcacaggcataagccaccacacccagccctctccgattttattttaatgtttgtttttgttttagagacaaggtcttgctttgttgcccaggctggagtgtagtggtgctatcatagctcactgcagctttgaactcctgggctccagtgatcctctcatctcagccttgagtagctgggactacaggtgtgcaccatcacgcctagctaatttttaattttttgtgtgtgtagagatggggtctagctacattgtccaggctggcctcaataaatcctcctatcttggcctcccaaagtgctgagattacagacatgagccactacactgggtcctatatatgtttcttaagaaatggggtattgctatattgtccaggctggactgaaactcctgggcttaagccatcctcctgcgtctgcctcttgagtagctgggactacaggcacatgccaccaagcctggctagctctctttttttttttttttaatttaatttttttgagatggcgtttcacttgtcgcccaggctggatgcaatggtgcgatcttggctcattgcaaactctgcccaggttcaagtgattctcctgcctcagcctccagagtagctgggattacaggcacccgccaccacggccggctatttttcttttgtattattaacagaaatggggtttcacggtgttggccaggctggtctcaaactcctgacctcaggtaatccactcgcctccgactcccaaaatgctggggttacaggtgtgagccaccgcctccggcctagctccccgattttaaatgctagcatgaaaatatatacatatattttttaattgtttttttgaggtggagtctcactctctcgcccaggctggagtgcagtggcatgatctcagctcactgcaacctccacctcctgggttcaagtgattctcctgcctcagcctcccgagtagctaggattacaagcacaggccaccacgcccggctaatttttagtagagatggggtttcaccatgttggccatgctggtctcgaactcctgacctccggtgacccgcccgccttggcctcccaaagtactgagattacaggcgtaaaccaccacacccggcctaaatgctagcatgaaaatatcttaaagcaccgtgcataacccacaaaccgctctgcggcttccagggagcatgcaaagaaccaagccgcacggccggggccccgagtcctgccgaccccacgcctcacctccctgctgcgtcttgacctggatggggtccgagaggggcccgtcgccgacggaggtgaaggcgagcacccgcacggtgtaggtctcgtcctccagcaggctgcccacggtggtcagcaggctgtcgtccacgttgtgcttctgccagttgcccacggggtgctccggttccatggtgtagtagacgcggtagccgcggatcaggccgttgggctccaccggctcctcccactgcacaatcatggtggtcgcgctgagcatccgggcttgcacgttccgcggcgcgctggccggggcctgctcgcctgtgcgggtgaccacggactcgctggggggcccctggccgatggagttgacggccgacacccagatctcgtactccgagttggggctcaggccgccgatgctgtaacgtgtggtggtgatgtcctctttaatctgatacggcccgtcttggctcttggatttatattcgatgacgtaataggacacaggatctgggttgcccgagtcccacgtgatggtgatgctggtggctgtgttctcagtcaccatgggagtcccgggagctttggggagagctgtgggcaggaggcagctgtgtcacgcattgggcacattggttgaggaccctgaaggctgtgtgacttttcaccattcagtcgccttctctgagccttgatttgcccagcagtaatcatgggcctcatgactcctgtcatcgtctacagcaaggggtaacaaactatggcccagggtccacccagtacccattttctttttttaatttttctttgagatggagtctcactctgtcacccacagtggcacgatctcggctcactgcaagctccgtctcccgggttcacacaattctcctgcctcagcctcccgagtagctgggacgacaggcgcctgcca[138 bp omitted]cccggccttttttttcttttttctttttttttttttttagacggagccttgctctgtcacccaggctggagtgcaatggctcgatcttggctcactgcaacctccacctcccgggttcaagtgattctcctgcctcagcctcccgagtagctgggattacagatgtgcgccaccacgcccagctaatttttttttttttttgtattttcagtagagacagggtttcaccat[140 bp omitted]aggctggactgcagtagtgcgatcatagctcactgcagccttgaactcctgggctcaagcagtcctcctgcctcagcctcctgagtagctgggactaaaggcatgcaccactgcacttggctaaatgtttcatttttttgtggtagagaaggggcctggctat[132 bp omitted]aaagaacaaccgtccccttcctagccatgaatgactgaagccaagagggtaactcggaggtgctcccacgctgcctcccacctgtgcctgaagtcggggatcgactccagcctgcccctccacctacgagccccatgggccctgctcacatttcaccgtgatctgagcaaccgcctcaatgacgcccaggctggacatggccacgcaggtgtagttggccgagtccttgacatctgtgagttccagcacgttccgacccacgggcatgtcatcctcgggggtcaggtcctcggccccctgcatccacttcacgtatggcatgggcgagcccacggccacgcaggtgatgttcacgttgccccctggcatgatctcgtggctcatgggcaggatggagaagcgcggggccacgcggcggactggggagggggcggcagtggcggcgggagggagatgcgaggggtgaggtggggtgaggttgggaggggaagacaggatgcggaggagaaaaagaaaagcaggaaggaagaaagaaagaaggaaagaaagaaaaaaagaaaaaaaaaggaaaaccatttaaatataaacagggctggttcttttccctctgttgatttttttcccccaaatgaaaagaaaacaaaagaaccaaattaaaaaaccaaattccaacacaaagaaaccaaaacttcaaaggaaggtacttcacaaacaatatatagagagatatatcaatatataatagacatgaagcattatctcatagcaacagggtttcatagaccagggtggctggtcacagcacagatacgaacacaaaaatttatcagcggtttctcatctttgcagacagcagtggcttcagggagcaggtggcctccgatcactcccgaatgggggcatccccttcggggagcgctggaagattctggctgccaagtttcgggatgtgagtgggttaggagagggggcaacttccaaccctccctggttctctggggatgtggcggtcataggacacttgttgaggccaggagacagagggagcctgagatgtcagtcccccactccccagtgacctggggccctgcccacttacccgccccctccgaccgggccctccaggaaaagatgagaaactctaatgaaatttttgtggtttttgggtatagaaacccttctaaaagcttctgtcagatctgacaagtttccatcaatagatgcagctctgagtcacaaacatcatgcaaaatagattgagagagagagagagagagaaagagagagcgagcgagagacagagagagaaaggagggaggaactgcagggggaagatctggattttggggatctctagtgcacacttacgtgacaccagagagaggagacgaatgaatggggagaaagagagaagaatagaaaatagggacagagagcgggaggggcagagaaagaaagaaagaagggggggcccacttcaatgctgcatattaattctagcagatgtgatccaatgtgacatgccacattgtcacatcacagccctggcagaataataaatagtatattaataataataataataataataattaataataataaacaagggaatgaacttgaacgttgagagaacagggacatgttctgtgcgtttcttagcggggaagtggatgcaaccttctctcaaagaccatgaaggcagcaggatgcatttcgggggctccgttttcggaagtcagatgggttccaggacagggggaaggggaggaggccagtgggcacctgaacttgcaaagagcactgctggcccacgggggctgtttaactgctgtgggaaggactcgggtgaacctaataaatccttctagcaggaaaaggggttgtccctgggtgacagtctcaggtcctaaagaagacacatgggtgcgtccccagctttggatgggtgaaggagtcttgtttcaactgcacagatgacggactggaggctcagttaggatccccatcaacacctgcctctgattttcatacgggattgggaggtgcagcctcagggggtggtctcagggggtctggtctacgatgctgaggaggaggttcaaggggataaagggaggtggccccaactccctcccttccagcctcggttcctagctggaaatcccaacccctgccttcctgaatccgggcgggaggcaaagagaaggggggacgtcggcaggcgtgggagtggggtccggaagctggcagcccttcggaaaaagaagccccacgaaaagtccagaagtcgcactggagacaggatggagggagtggagggtactgctccaggggaggagtcggggcatggggagacagaagggccatgcacacagagtggaggtgaggggcgaggtgccgtgagatggggggggcgggtggctttctggtagggctgggtggagggtgggggtgtggggggagaatggggtccggccagccagcggacgcggtccaggccagccgccggcacccacagcgaggcacaggtaagatgccaaggctgagttgtcatggaaacagaacacaatggggaaatgagcgtggggggagctaattattcaaggacagaaaaacggtatcgacgtccaaaacaaaaccaggaagaacaaatgaaataacaaagcaaaagcaatttaaaaaaagaaagagagaatctaaaaaacaaacaaacgaaaaaactccctccaaaacaaaacacaacacccaaaagcaagaagaaaaaaaaaaaaatcatggaatgggtgtggggctgaaaatcggggtctgaaaggaggaggactgtggcttccccagggagacgccctccccctggcagaacacaggatccggcctccccatccagcacccaagagtcttggccacgggtttggggcggccacaggggtgggagcctcgtggacaaaaatccttcggaacaaaccaacccagcccgactcaagtctctctctctaaagcccctctcagtccacttctcgacaccctgcctctcttagggctgagcaagttggaggtcccaaagctgaaatcacaaagcaaggtgaactcctcaaggtctctgaatcccatagtaaacctctccaggcagacgtggaggagctgatgtggctgaatgagcccagtggccttgggaaggtcccccatcctcctggagcctcagtttcctcatctgtaaaatggagggaattgggtatcctgccgagaaaggcattaacctgactcgggcagtgcctggcacagcaggtgctaaactcaggcatggagctggtgaagttacctttcagcctcccaggggctgggacgatcaaacagcttctctaccttaagggagttcagggatgaattataaaaaggaaatggaggcaggcgcagtggctcatgcctgtgatcccagcactttgggaggctgtggcaggtggatcacctgagatcaagagttggagaccagcctggccaacatggcaaaatcccatctctactaaaaatacaaaaattagccaggcgtggcggcgggcgcctgtaatcccagttactctggaggctgaggcaggagaactgccggaacccgggaggcagaggttgcagtgaactgagatcgtgccaccgcactccagcctgggtgacagagcgagactccatctccaaataaataaataaataaacaaacaaacaaacaaacgaaatggaaacagtaagaatttctactgaattcccatcttatttcttccttctaacaattttgagaggcaaacgtccttatgctcattttgcagatgagggaacagagactcagagaggtgacaagactagatggaactcacagaaaggaagtagtgtagccagagctcaaagccaggccagcctggttgctgcctctcagagaaaacaaggcttttctcaccatagtgagtaacgaggattacggccaagtatcaatccttggcatctagctctttcaaacttgtgtgtcctgacccactggggacaccaaagaggaaaaaagtacccatcacctataccaaactccatgtaatggccagttgccactggttgaataatatccagtagccatcataataaatgtccagaagccatcagtaaaaggcttatactcaaaggaattgttggaacgtcaaagggagtaagatctagctttaggatctaaaggttaagtgccaggccaatttatctattctgtaagggtcaacatcttatccaaaagaccctgttcctgtttgatcttatcttaaaatatctctccatagggatgtcataatttgcaaggtacctttaactttttttagaagtagagacaaggggatacctgttgaatatgtaaaagacttgcagtacagggttaactataaatcagtttaatgtgggagggcatttatcaacagcagtaattttagggttcacaatccccaacatggccggcaaccatcagttaaatggacctgccaataaattataatggctcctctgacacctaagaaacttgcccacttgctttctcacccgcctcatttgtttcaaagggtgtgctctaggaagagggctggtttgccacgagtttaagggaggatcatgcccattggcactaggtggttcagatctccccctccctggcggccttgtaaggcctctgggcatcctcccagctggcaagggcgggtgactgacgctgtgttctgcccggtttggtgctggcacccacccatgtcatctttccacccccggctgcaagcttgaggtgcaggttagaaagtaaggtgggcacggtgcccacgggacggagaggccccgcgggacccccgcccccaattaccgacctgaatggagggtccaggcaggttataaggggaccacaccagccttggtcctcagcacgctccagctggctctggtttccagctcttctcgtcaccgagtagccggggggtcccagcggggggacccgcttgggcgagggggtcgggagggtgggcggtggggtgggggggtggcaggttgtggggggtggtcgcttcaaaccccgattcacatggaaaaacaactcaaaaaccgtcaaagcaaccaggagacgacccctcccccaggcaggaagaggcagaaacacaaaaaccaaaaaagggggttgggagtgggggcgagggtaaaggggaggaaggaaactcaaaagtgaggtgatctggttgaagcactaggtagggaaccccgacagtgtcagacatctcaacgattcagcaagccgcagctccaaggggtgcgggggcggcgggggggggggggggggctctgctgggcattttggggtgggagaagattctagatacttctccaaactccaaaatgaatatgcggatggagagggcaggggagagatgccaagaaattgtgcagcctccggggggtttatttaagcttagattacacctgtcgggggggaagggaggggttggaaacattcctaattccatagcccacttcttgtcctctcctttgaactccagcctgtagcccaaggagggtgggcaccgcccctcagcccacctgcgtattttctgctacccttctccatcattttgctgtgcctccttccctccctcccgcctctcccccccaccgccagctccctccgccactgaggtagcgtgcaaggcccggagggacctggctggctccctggcccacgggctgaccagcggccttggcaagtcattggtattttgagctggacctttggatgcgctctagatacttttttttttttttttggtacccgctctctctttctctcatttctttttgtttttcccccagttctggccaatccatggacttccctcaccacccccccaacctcgctgtggccgccggagacacggggctttccaaatgacaaggtgtaatctaatattcccctcacaaaccccctcccccaacagaggaaacagcgaatgcagagggtgtgaggcaggcagcaggcgagaggtgttcagagctcagtgttcctgcagagtgaccccctcctcgccgcccaccctggccaaatggagggacgcctgccttcccgcccctggagtcccctctccccgatgtgatgagggtgggatgagaaggtctgggtctgatctaacactgcctgcccctagggttaagccagcggccttaggtagggaggcgtggccaggtatagtaagcacaaactagggagctggccaacacacctcaacgcgaggctttctgggaatacaggaggtgaggggtgttccagcccaccatctatgtctgtccctgttttggggggccaagaggtaaggggaacacctggggtcacatccatcaattttagggcttgggtattggaaatttaatttaaaaaacaatttttccccataaatttgcatagatggattgatctgaaaaggcctggggacaggtcacaaatactgaaaaagaagacctgggaatcgggcaatctaggccttgctggtgtcacgcagcaggtactggtttcttagcttagcactcaagactctgcgttaaattatgccagtcccatcggcctcttccaaaaccttgaagatatcctcagacccttcaaggtagaacattgctcaaccggcagggcacggtggctcactcctgcaatcccagcactttgggaggctgaggtgggtgaatcacctgaggtcaggagtttgagaccagcctggccaacatggtgaaaccctgtctctaccagaaatacaaaaattatctgagcgtggtgccaggtgcctgtaatcccagctactcaggggactgaggcaggagaatcacttgaacccaggaggcggaggttgcagtgagccgagattgcgccactgtacttcagcctgggcaacacagtgagattctgtcaaaaaaaaaaaaaaaaaaaaaaaggccgagtgtggtggctcacacctgtaatcccagcacttttggaggccgaggcaggtagattacctgaggtcaggagaccagcctggccaacatggcaaaaccctgtctctaataaaaatacaaaaattagccaggcgtggtggagggcaactgtaatcccagctacttgggaggctgagacaggagaatcattgaacccaggaggaggaggttgcagtgagccgagatcacgtcaatgcactccagcctgagtgacaagagtgaaactccatctcaaaaaaaaaaaaaaaaaaaaaaagtaaaagaaaaagaaaattcctcctgatgtctccagctttttccaagttcccctggcatcagagggtggcaaaccatttacatgggtcctgtgcactacgtttcaataatgctatgttgcaagaccaggcagtaaagacactacctttagccactaactcatactctaaaggcttagagttttaaagaaccagaaaagaacattcatagtcagggagaatataatctgatcatcttcccaccttgtcaaaagtcggaggagggagaattcaactacagctgggagtggagctgccagctgtatttttaaaaatggacacattttgacttaagccctttggatcccagagataaatttcaggaggagaagggcaagcctgaatattttaccccctgtaccacccagagtcagccaaagctggagatctgtcagtttagaaaataaataagagtgagattaggggttgcattttttcccctttttgcaattaattcctgtgactggctgctctggcaacaatgtaaatacttgtagctttcagaacatgccaggtagcccatctcttctggtgggctggtacttatctgcaagggtagccttgtacttaatatgggcctttgttgtccctttctgtggccacagaacttcctaggaaatgacagtggggaaaatgagagctatggctctgggtagtccgctgatctcatggggatggggctggagccaggagaaaatgagatcatgagatgagctcaggaaagcactagcgaaaaatgaggtctgagcaaatgaattagcttctgccctacaattatttttaaaagtttcccatatgccatcttattcaaacagtggacatgtgaagtacataacagggaaactaagacccacaaagaagggaagtgacttgcccagatcatttgcttgaatcctttatttacaacaatcctactgggaatgcttgttacacagagcacttagttcaatgaaatcctttcacctaccctgtgatcaaggttcatttatgatctctactgttcagatgaggaagtggggactccaagtggtcaaatgactagttcaaggtcacgtagccagggaggggcacagacaaaactggaatccaggtctgccagagtccagagcctatgctctcatcactttctgggctgtactgcccagaaagtccaagtggtcttcagagaccctctgttcactcagttccaatgcaccagcacctagctttggtggaggggctgggagacccctttctgccatcttttggcactgctctgagggtcagcctggcagctcgcatgctgggttaataagcaaatcttactgcatctaaagtcctcttgccaacttggtccaggatttaataattggtaagtttggagaaggtgagtgagggacaagagggggaaaaggtgattccaaagtctggcttctgtcctcaacatcgtctaaacggggtagtcagctggggttggtggttaaaaatctacacggatattttattggggggtgttttttattgggggttggagtaagactctcaagggcgtgccttttcttggggaggggagcagaagatgggggtgtgcatctctgaagatttgcaagagtgagagacacacagagagaaagagagttgaaaaagagaaagagaagcagagggagagttggggaggcagagagagcaggggagaggctgtgtccaaggttcccctgggctttttccagaattccacagctctgatgctcaggtactcagaaagtgaccatgctgtgttgctggacaaaagacgcctgtgaccgggctcagagtctgagaggggatgggggaagcagccagtgctgcctgggaggcagaggcatagtgttccaggtcagataattggccaagtctttcttccaaagtctgtcaggctacatttcctaatgggcacttctggattggtacccagccagaatgcatacagtcatcacagcagctgccattttgagtgccaattacacaccgagtatgcatggtcctgtgaaaatggtgctgttattgtcctctcccctcatttaaaactgaccataatccatgtttggatatgtcactaaaatgaataagaactcaaaatgctagtgcacattcagcagtacttcaaatgcctgggtttgggcttatttgggagcgcaggaggcagtctcattctgaggtagaaggatgggaacatgcctgcttaagcttccttccaacatggctgcctggaggcagggagctgagttactacctctggggaaagaggagctggccagtgaggtcaggaaaattgggctgctctctccacacaccccacccatgttctgacctcctgccatctgtctgtgccacctcccttgtgcccttgtgcctaagtggtcactttctgccctggcatcccagctgtgggaccccttctgccctcctggatgatagctgggacaggaacactggcttttaaatcacaatgcgtttggagaacaaccacagaacagctcaacccaagaaaccaaaaccaaatagcacagacacaagacagaaccaaagacgagtcgctttgggggagaagaggaccaggtgaagggaatgggaggggaaaaaagaaccatttgattttttccccccaaaacgaaacaaaaccaaagaaaaaaagaaaaaagaaaaaaaaaagaaaaaggaaaaaagaaaaccaaaagagaaaaacagaacagaagacgagaaacactccaacagaaggcgttgggaattcaccaaaccaaaccgacaagagaggcatgcagagaaatttttacattctcccagcatgcatcaggcccaagttaccatgacgacgaggagtgcaaaaaacttagcaacaacattaccaacggatgcagaggcgaccataatgcaagcatcgcatgtgtgcggccggccctaggccgggctgggcgcggctgagattttcgtgtctttctgggttttgcgctcgcttggcggttttttgtttagtttgctttgtgcttatgattcatattccatcttttaaaattgttgttcatttttctattttttttccgtgtgtgtgtcagcgtgtgtccgtgtggtgtctacatgtgttttgtgtgtgtgcgtgtcattttcagaatgtaaaaatgtgggtaaagaaagtaaaaaagaaaaaaacacaccaaccttctcgaagctctgagggatgtaaagggggtttgatgcagaacacaatgacatgggaagaagagaaaaaataggggagatacagagagtaaaaagaggacttcccaaggctaaaagctgcaatagtttgttgttttttttttctttaaaccaaaaaaaaaaattaaaattaaaaaataaaaagaacagcaatgacctttttgtcttctctccactctgccctcaacatacaagatctactacatttgcctttctccattcttttctaagcttgattctggagcatctaagacccaggcaaagatggggaaacagaacctcaccccctcaactgtccccaagaggatggaggctcatgctggggaccccacctctgggggatgaggacacagaagcccccctcccttcttgcaccctcactaaaggccccacccggctccctgccccacacccgctgtccacactcttttgagccctgctggatttacaaacccccatcccaggtgttggcagagaaataagcaggttaggtgaagaccagtcagttggagtcacgaacgcattacaactcaccagaggtgccgtgacagtggatcagacgtgcccctacccaccacccgtccatacacccacatccccatcccctccccctccatgcgacctcctcctcagagacaaaatgcaaaaccccaggtccaggaccaaggaatcacttcagggccagcgggtgctgtggatggtagggacgaaggtggtgagtgagggtctgtgggtaagggatgagccacacggcctcctggatggagaacaactagggcttggtacttcgcatgggggaaactgaggcccagagaaggatgtgattgagtcaattacacagcgctaactggggcagccctagggattgaagggcgccctggcatcctggcagaagctgtttctaccacaaatctgatcagaaacagcgactaggaggtgaaagggaggaggaggaggaagactacaacttctgaaaagacccaagagccaacacacgagataagaggaggccaacggaggcatctgggggcaagggagccccctggcacctttgaggcagcaccaagggacccacaaggaagtaagcttccttggggcaggggagcggggaggtgctggggcgaggcccccacgctgctgggcatgactgagtgggaattggaaactgagagtaacaagcttcgctgggtgccgtgcctgccccagctcggtgcaactaccgagccccccgggtgcctgtgcccgctgtggctccagcctcccatcggcctggactgcccttctcggagagtcattaggaagaggcagaaggcgccgggctccggaccagctggtggggggtgggaggggcagcctcgaagacccctcctcaacttctagattgagggccctggattagggggggcagtgaagcggggagctacgaggccacaaagttgggagaagcaaagccagcacacagcacgggaaggcacgacacaccacagaagccaactcgggtgggcaggcaggtggggtggggcggggcagaggcctgcaggctcccctggccctgtaggcccaagactgaccccctcaccctgccccacgccttcctaccccaccatcactgcctccccagagcctgctgcccacggggcatctctcgcaaggcacgaggaagggaatttaagctgcccccattctacaggcaaggaaactaaggcccagagagggacgccgcctcggccaaggtcccaccgcgaccggggaggggccttcctgcttgggtgtgcaggggacgggggagcccggaggcggtgagcccgaggagggagggggatgggacggggcgggtccctgcctttgacctggacgcggcgttccctacctcgcacgtagaggttggcaggtgaggagtagcgcacgccggcgctgttggtggccacacactcatatttgccctggtcggtttcctcactgctttcaatctgcagggctcctgtgggaagatgggaaaaagcttggtctgttagaggggggcccaggagtgaacagggaaagctcccccaccagagtgctctctggcctgtctcctgtgctggctgggccagagaggcagataagaggtgagaaaacctggaagccctagcttggccaggccttgtataacctccacccccacatctagccccaccagggcctggacacaccagattccccagcaaattctccactcacagtggaaaagcagctggtcatgagactgctgcctcatgactgccaagttgaattacaaagatggagaaaagtgtgtttgagaaagcactaagtgatgctctcctggccagaaggaaagagtgggttggcattcacaactcataaccatcatttgatagatccagggacctgagggggcccaccacaaatcatgtgaaaattcagggagctggtggttgctttgtttcattaggtgcccgtgagtaaatgaacatgggtctgggttcctcagttgtgtttggaatcctagtcctcaaagtcctcaacgcccctaagtaaatggagacggggttgtacttcttcaggtgtgtttgaaatttcaggattaggttataccctgaggcagctaaagtaaaaaaacgttgatgctggtgtgtatcaagtatgtttgagatcaaagccatggatccaagccttctggcctgaaactgattgaagagaagtcagaatttccccaagtattttaagtcatctaaataaaagtctgaatttacctgcttgtatttaaaaccacaagcctgaagtcaacatcctggtgctcacgagtaactgaatggacttcttcaagtgtgtttgaaattatggtcctagacccaattctatgatgctcataggtacccaggattagattaaattttcaaaagtgtttgaaatcaggggtctgattgaaagcctctcatactcacaagtaaagttgaggctaaaatgccccaagcctggatcaaagaatttgttggtcatgagtaaataaagatacaaagaagagggcaatttttcaagcatatttaaaaccacaggcccaaatccaaggtcttggtgctcatgagtagatgaaaataggactgatttcccctcaatacatttgaaatcacagacccaaatcaaagacttcactttccatgaacctataaaaatgaatgaaccttctcaagaatatctgaaatcacaggccttgatcaaacactactgtgcccatgagaaaatgaaaacgaggccaagatttccccaaagatatctgaaaccacatgcctgaaacaagtccctcattttcaccagtaaatgaagctgagtatatctgaaattataggccttgataaaaacttgagtgcccacaaataaaaaataaggcaaaagtttccacacgtatgtttgtaatcacaggcctggatcaaagtccttattttcataagtaaataaaacttagtgtaacatatctaagtatgtttgaatcacaggcctggacccaagtgcctgtcgaccatgagtaaatgaagatgagtgaatatccccaaatgtgtttgaatcacaggcttcaatcacagcctatggcaccaggggtccaaaaatccagactgagctttccagccttgtttgtgactatcccacagaaatgacatggacccacagattgggggattctctctggaggtcatggataaagactccgtccccatagagcactgcctattctccctggacctcgaggttctgggaagcaggcagtatctccatcactaaggaggcccagagagggtcaggagactgctctaggtcacacagcatttgtagcaaaggtagggctggacactgattcttccccaggttcccactcaggccttctcttggctcttctctgaggcaaaagttgggtagggggaaagggatggagccgaccgacctgagagtgcatgtctctatgtgtccttgggttagaacctccagatcagaaagaactgtggagctggaaggcccactttgcatgttcgttttgtttctttttttttttttttttgaggagtctcattctgtcacccaggctggagtgcagtggcatgatcttagtggctcactgcaacctctgcctcccaggttcaagtgattctcctgcctcagcctcctgagtagctgggattacaggcgcccaccaccatgcccggctaatttttgtgtttttagtagagatggggtttgaccatgctgcccaggctggtcttgaactcctgacctcaggtgattcacctgcctcggcctcccacagtgctgggattacaggcgtgaaccaccgcgcccggcctgcatgctcattttagaggtggctaaaccacatggggctcccagcactctgggggtcttgccaggtagggtccttcccagagggggagagagcgcccccgccttccacagccaggtgacctgaggagtcacctcggccacattcagccccctggccacagacacagacacagacgcagagaccggactaacactgggtggaacaaaggtggtggcagggtggacacgcatggaagggggcctgggggcaggccctgtggagcctgaggggctgagtgggcagcaagagcgagcgtgagtgggtgggtgagtgaggagcctcttacctcgaatcggagtgctttctgtaagggaagcagagagaaccaggtgaatgtcacaaggcggttgttggggggccggggggccccagggaagctgggctgggccgtaagccaggcctcagcactctgccccagggaggggatcgagccagccctgggcatacggaccctgcgggctttgctgaggaagctaggagaggcctcctaggagcagggtgaggtctgagggcttgtcaaagcaggagggtttcctgtagaaggcgggaatctctgggggtggagggatggagtctagaagcctctctggatgggtgaggggcgtctctatgcccagggaaggtctgtcagcctggccctttggtggccttccctctgggctgagggagggaggttcatcacccccccttccttctttccgtcttagggagcccagcaagagactgctttcaagtccagactaggaggggacaaggagcaacaggaattatcttgttagagacaggggaggtgggtggggttagtgccccagtgccgggcattaatacagccaaggaagggtgtcacagacaggccgagtaggagggacagggagagcctggcagccttcttaccaagaggaaaagaggaaagacctgtttatctgggccttggaggcagggatggttaactgcaaagcaggaaaaggcggctcggggctggaacgttactccctctgctcatgatccagggagaagttttgggcccccttctctctgctgctgatggccgataacttgataactcggctggctggggccaagaagatcccaagacctcgatctgccaggagtggccagacacgtgaaaaagcagctccttctgcgtggcccaaacccattttgcagacgggccaactgaggctcagaggggaatctctgaggtcccatcatgaggcaggggtgggcactgagcctagctctccagcctcctgggatgaggagcttctggcctgaacttttcggagtccctgaattatctttcgaggtgttctcgtgaggccactctgcaccctttagaggggagcaaacagaagtttgcctaaagttacaccctggagaactggaatccgagtcagcggaaatccaggctggcctttgctaggacactgggatgacgatggtggaagtcagggttaaagaaagtcttttcaggccgggcgtggtggctcacgcctgtaatcctagcactttgggaagccgag[134 bp omitted]gaggcaggagaattgcttgaatcggggacgtggaggctttagtgagccgagatggtgccactgcactccagcctgggtgacagattaagactgtctcaaaaaaaaagaagtcttttcaagttggccaaatcactcagggctattctatcaagtggaaacaatgtatcccttagccattaaaaggtgttccgcctcccaccctgagagagatgaagggactgatagcataggctgatatcagtcactctcactttagtatgaattagtcccacaactgatttcaggagattcaggctgaatgctgagaaaagtggatgagaagtgcccagtagcagctaggctggaaaaatctccactccacgcccagccccagcccccaaacttctgtaattaaatccttttccagcagggctaaggccaagaaaaaagtgcgggaggaaatgttgttaggtgcgaagttccatgagcccgaggatgcctctgaacccccctcagcctgcattttgaggtctgcctggccttgtctcttttcctcttttcctttgggtggacttgtctcttttcctcttttcctttgggtttctttctctgccgcacactagtgccagctggggagggctgaggggccggtcgcggggaggagggagagggcgttagtaaacataccaggcagagtgggtcacagttaccatcacggtggctgttagtttggtgaggagaaggggagcagaaggggcacaaaggggatggggcgttagttgttgacgtggtgatgaaatcagacttaccaaaggtttctgaacgtttacaacaggaggataagaaaagagaacaggaacgttaacgggtggttacaaagaatcctatgtcctcagcgaggaggggagggcgggggaggggagggggacgctcagaataataataacaacatttcttatgattcctaaagtggcttatgttcactgagcacctagcaggcgctagacattccatcctggagaggtcaccagaacacaaggaaaataggcatgttttatggggaaactgaggccaccgctccccctgcttgcagaggcctatgagctgcaaacatcctcagccaggctgggagataggaggcgatttgtccccccagtgtgaggtctgagtctctccaaggaagacattctgggctccacgtctgatctttttggggcttggttttcactaaggaggaggagcagaaagcggagaacaggtaggtaggctctttggtggggggcaacgatgggcagtgagtgaggggcgctggggatgattcggggaggtactgctgcaaagggggctccgtggcgggatcctcggaggaaggggagagagaaagcaaaaagaggggtgtgtggaggtgcagggtgatctcaacagtgacctgaacgaaggcagggcgtcaagcccggcacaactgaaaacagtaaatccgtgacacagacaaacacgcatgtgcagccacacgtgtgctcccaatgtatggagacacatccccaccacgtgtgtccccacgcacgagcactagggaggtgcaggctgagaggcgcgtgcgcggatcactgccctgtgtgcacaggcacgggagtgactgcaatgtgggtgcacgtgtggccgagatgcaggcggacactttgctccgggcgggggaagggaggcccgtgtgtgacagcagccaggcctgcacacctgtgcccacaggcgggaggcaggccaggccggcacagggagcccagacatgcacacgtggacatgtcgtgaagcggggggacaacacacacgcagacacagccccccagacagatggacccacagatgggccatgtgggtgctttgtggagacacaatggtggaaccacccgtctccaaggctctgtcccaaggtctccctagcccagccagggcctgaacagacaggctggactgcccgtctgtgcccccttacagacctgaagccccgccatcacctcttactgctcagccttggagagactctctccctgtagttttctatggctccccatcaccttacttgtcacctctggacacctgccattgccttacacagcttccactactcctgcctgtctgggccccactgtattctcactggacgtgcctaatgcttctgtagaggatgctctctgccaccttccatagctccctattacatacccattgaagctggtctccccttgtcaccctccatggctcactgacacttctgcctgtctgtctcccattgcttgggcactgccgatacccaccatccttggcggctttctttcttttcagagatgagcgtcttgctacattgcccatgctggtctcaaactcctggcctcaagcaagccttctgccttggcctcccaaagagctcggattacaggcataagccactgcgcccagccccctcagtggcttcctatcacccacaactgtctgtgggtgacagctgtgatctcactgcctgagcatgggagacactctccccgcccatggccctatataactccccatccttgtgcatgtctgcatccattatatcttcattggccaggtgttgaagcactattcttctaccaccctctatagctctccagtactcatgcccatctgtgccccctaatatcctcagtgtgcggctttgaagacatttgcccccactcccccagagccaacgcctgccacggccacacactgtctctgtctgtcctccagtagtccccagaacttgggccctggagatgctccccaccccctgctgccctccaaggctcccacgtcctgtcagccaccctcactcacctgatcgcagctgtttgatgcgtccattgctggcactaggatccacaggcaggaagtccttgaaccaggtgatctcagggtcagggttgccgctggctgcacagagcatggtggctgtccgtgtccgctccaccaccttcaactgtgggcccatgtcgatgttggggaagccagagggcagctggtcctctgagggcagagacgtgagagaaatgggcatggttctgagcactgcacagccactcctgagcctggggctcagggactgcctggccacgggtccagctcctccctggctgcgtgacctcagccatgggtgccatcctttacagccagttctctctctttttttgagacagggtcttgctctgttgcccaggctggagtacagtggctcgatcatagctcaccgcagtctcaacaacctgggctcaagtgatcctcctgcctcagcctcctgagtagccgggactacaagcatgcgccaccacgcctggctaatttttaaaatttttgtagagagggggtctcgctgtgttgtccaggcgggtctcaaactcctggccccaagcaatcctcccacttctgcctcccaaagcactgggattgcaggcatgagccactgcacctggttgggtccctcttctgtacaagggggaggctggtgtcagggagctgagccaggtagaatgatatttctcactggggggtgactctgctgccctgggagacactgggcgatgtctggggatatctgaggttgtcacaacttgggggtcaggacttgggggtgggtgctcctggaatggactgggtggggctgagagatgctctacaccctactacatataagcacaaacctggccccaaggtccacagtgctgagtgggttcatttacagcagcctgaggacgcctttctttttatcttttaaaaaatt[131 bp omitted]ggtgaaacactgtctccattaaaaacaaaaactagccgggcatgatggtgcatgcttgtaatcccagctacccgggagactgaggcagaaaaatcacttgaacccgggagacggaggttgtggtgagccaagatcacgccactgcactctagcctgggcgacagagtgagactcggtctcaaaaaaaatcaaactaaaaataaaaataaaataaataaaatatagagatagggtctcaccatgttgcccagattggtctcgacctcctgggctcaaggaatcctcccaccttgacctcccaaagcattgggattacaggtattttacaggtatgagccactgtgcctggcccagaggacaccgtttttattttttatttatttattttttttgagatggagtctcactcgtcggccaggctggaaggcagtggcatgcactccacgcccggctaatttttgtacttttagtagagaaggggttttgccatgttggccaggctggtctcgaactcctgacctcatcatccacctgccgtggcctcccaaagtgcctggattacaggtgtgagccacagccccacctgcctttctaaacataaaccacactgctcccccgctgtacacccttctgtggtccggccaccctcagaaggaaccctgcctgcttgcccgctgctggcccctgccaccttccctcctctttttctctctggcccagtcaccctggcctccacggctctcaaagtcatcaagccccctccctcgggtcacctgttctgttccctcagcctggaatccccgttcccacatctgtctactgatcggaacaccacctgggactagctccaactcccttgctctaaatgcccccacactcctcactctcctctgcagcagggaattctatctgtaacggtgcatctgtgtcaccacagcatccgtagcacccagcgcagaaccgggcatacagtaggagctcaatcaatgaacaaacaactcaatcctggttgagcactcaatcctccagcaccaggtgagtgagtggcaccaggtctccagcgctcggtatccctcttgggtggtgaggttctggctcccctccatggtaaatggagaccggtggtgatgtgggggcgggggggagcggggacaaggaggagaaactcaggtccctggaatctcctggtcccagagctccctgagcggtgggaacatgcttctgggctgaggtgatgaggtgagccagctaagtgacgggctgccttgcatccagggtgctctacaaaccaagatgggccggccgtgggggctcacacctgtaatcccagcactttgggaggacgaagcaggtggatcacctgaggtcaggagttcgagaccagcctggccaacatggtgaaaccccgtctctactaaaaatacagaaattagccaggcatggtggcggacgcctgtaatcccagttccttgggaggctgaggcagaagaatcgcttaaacccaggaggtggaggttgcagtgagctgagatcatgctactgcactccagcctgggcgacagagcaagactgtctcaaaaaaaaaaaaaaaagagattaggaaacagccacgtagggcagactaataaccgtgcccccccgcccccccaactccactccaacggacaagtgacaaaaaagtgacaaatcgcagtgctgttaagaccaagaaataggcagctcctctgcatctggtaggaatgctggagtggagggggtaaagggccgcaaaaacagccctgtagctgtatttattaataaagttttatcagcc[137 bp omitted]gcttggtgacgggcacctgtagtcccagctactcgggaggc[137 bp omitted]taaagttttattggcacacagccacgcccattcgtttctcagcttttccaacacaatggcagagttttgggttgttgctgcgacagagaccgtccagcctgtagagccaaaaatatttacttcctggtggtctggagaaaaagtgtgctgcttcctggcgtagacaatgtttctgtttgtttaaagaatacacatgtatttgcttacaaaggcccagatgggacatggggctcaggggtgggtggccgtggacagaggtgggcaggaggccaccatcttgggaggaaactgagccccaggcaagcagcaggagggcaggaggccaagatggggcaagggagaggtgggcaggatccagggaggggaagccagaatcaatccctgcctccccaggattacgagagagcggcagttccagctcgggggtcactgcttggatgggaaaagccccagtggaaagccctgagcactaacagcatcccaggcgcagcgcaggcaacggaacctgtgatctcctccaagccttttccatagagggggaaacggaggcacaggcagtcacacacttgtcccaggtcatacagccagcatgtagcaaggatttgaacccaggcctggctgagctcagaagaagctgagcaggaccggctgcaaaagccctccactcaaccaggtctgaacccatcggggccctgaagggggcatggctggatgccgtctgaggcagttcaggcctcttgtccatccttcctgggccagggacctggacgaccttgaaagtggctctgattggctactgatgacatcatcggagatgagggccaaaatgactgggcctcactcaattggtcttggtgcccacagctgggtctgtcggcatccccctgtgtgtctatgcatgctcgtgtgcctacgagggaaccctgtatttcattcatgcgtgggtacatgtgtgccgcatgtatgtgctcacgcttgcccgtgcccacgtgtccacacgtgagcaattcccgtgtgtatgtggccccgcaggggtccccataagcgtgtgtggacagcagccagccagggtgcagggggaggtctcggccgcctgacgctaccgagaacacctaattaaacaaaaacgtacatcgcgaaccacactctgcccagttcctcggagtttaattaaaacaacagtgcaggaggcgtgtgtggggtccacaatcagatggcagaggaggaggaaggcagggagtggccctggcagtccagatggtcccccaccaactgccagggactggccggaggtgcccggagctcagggctggtggcaaggtgggtgggatcgggtcagggtatccaaggccccgggccccagcaggaagaatgagctcccagcccaagcaggcccttccaggcagccggagaggagagagaaaaagggtgtgggctcggcacggtggctgacgcctataatcccagcactttgggaggctgaggaggtggatcacctgaggtcaggagttcaagaccagtctgaccaacatggcgaaacactgtgtctactaaaaatacaaaaattagctgggcgtgctagtgggcgcctatagtcccagctactcaggaggctgagccaggagaattgcctgaacccaggaggcggaggttgcagtgagccaagatcacgccattgcactccagcctgggtaacaagagcaaaactccatctcaaaaaaaaaaaaaaaaaaaaagagtgtggatgggcgcagggggcatttttttcccagactccgggggaccgggcagttgatggcttcacagcttgtccttttaataccctgagtgctcagagtgcaggctggcttggggcaagagaaggcaggttgttctgtcccagcctgggaaaggtcagggcaaaattatctgctaggaagagcagggcgggccacggtgggcctgactccgcccccgctccttcctccatcccccagcaggatgggatccaggacccacgcaaatgaaattgtggggtctcttgttagaaaagtattaagactttccagaccacaatagcgagcttttatcttttcttccccctcccccccaccccccttttagagacagggtcttgctctgtcacccagactggggtgcagtagcatgatcatagcccactgtagccttgaactccgaggctcaggcgatcctcctgcctcagcctcctaagtacttgggactataggcaggccccattacaccaggctaagttttacatttttctttttgtagagacttggacagtgaggcatggggtctctatgttgcccagactagtctcaaactcctgggctcaagtgatcctcttgacttggcctcccgaagtgttggcattacaggtgtgagccacggcatgtggccagcagcagagctttaaaaagcacggggcctttcttttttttcttttgagatggagtctccctgtgtcacccaggctggagtacagtggcgcaatctcagctcactgcagcctccgcctcccgggttcaagcaatcctcctacctcagcctcccaagaatccgggagctaggatgacaggtgcacaccaccatgcctggctaatttttgtatttttagtagatttggggtttcaccatgttggccaggctggtctcaaactcctgacctcaagttgtccacttgcctcggcctcccaaactgctgggattacaggccaaagcacagggcctgagggagggatcctggatgactgtacaggtcactcgcctgtgatgccagtcccagtttcatgggaccagagtctgaaatcgagtactactagggccgctgtgataacccctcccagggctccaagctggtcacagctgggctgccgtggaggacattggaatagcctcatcttgggaagccacatgcaggggtcacctcccagctaatggctggcagtggctcatatacatgactgggatgtctctgcaggtgacaggtggaacccactcacctgagggctgcagaaggattggtaacaagcatcttactaaaccagaatcctaacagtgatgaacacagtaacggggaagtagaattgaccaaatatggcattgtgctaatcttgctccctgtatcactcactcatctggttcacggaattaccccttgtggtgagaaccattattacccgattttttttttttttttttccctgagacggagtcttgccctggtcgcccagactggagtgcgatggcgtgatctcggctcactgcaacctccacctcccaggttcaaacgatcctctcctgcctcagcctcccgaatagctgggattacaggtgcccaccatcacgttcagctaatttttgtatttttagtacagacagggtttcaccatgttggccaggctggtctctaagtcctgacctcgcgatctgcccgccttggcctcccaaagtgctgggattaccggcgtgagctaccgcgcccagccatttcatttttattcattcattcattcattcattcatttattttgagacagagtttcgctcttgtcgcccaggctggagtgcaatggtgtgatctcagctcactgcaacctccgcctcttgggttcaagcaactctcctgcctcagcctcctgagcagctgggattacaggtgcacgtcacctcacccacctaatttttgtatttttagtagagacgggc[136 bp omitted]ctcagacaagttcattaacctgccctaggtcacacagcaaccaagtggcagccaggacttgagctccacaggctgggcccagtgctaagaccaaactgcagtggagaaggcagcacagagtggttgggcaagggtttgtaggcggctgtttgaaatgatgctgaacaaaaatttgttcacaaaattgcttcctcattataaaacagcatcactcagacagccccctataaaccccttgcgacttgttcaagaaatgcatttaggctgcatgcagtggcttatgcctgtaatcccagcactttgggaggctgaggcaggcggatcacttgaggtcaggagtttgagaccaccctggccaacatggtgaaaccctgtctctactaaaaatacaaaaattagctgggcgtggtggcatgtgcctgtaatcccagctacttgggaggctgaggcaggagaatcgcttgaacctgggaggtggaggttgc[132 bp omitted]tgcaggcccgtgtgaatgtctggggaagtggggcagcagtttctgcctacctagcatccgttcatcctttattttttgtagagatggggtctcgctatgttgcccagtctagtctcacgtgtgatcctcccacctcagcctcccaaagtgctgggattgcaggtgtgagccaccatgcccaaccctgtttatctttattcctttgggggaaccacactcactcttggctccaggtaggagtctagccaatcagagtgtttgttcctcctgagccacagtgattagttcagggaagggaatgggatccaagttcattggcagtgggggaagtctcactaaggatatcatcaatacagaaggaaacaaagccaagagacagagagtgagctctgagaaaattcaatgagcccctggatccagctgaacctgaagccagccactccatggaattttaattctgcacatcaattacctttctcgcttgaacccatctgagttggatcagccttttgtcatcagaagcacatgatgaagattataaattaggatgattctagtctctcaattcctttctttcttgcaaaggcacaataaatccccaccagtaggcgctgggccctgagactgttactggttggataagggagatcaaggtcctcccaaaaaacacaaagcaggagggtttggggtaactttcatgtattccttttgtgcttgtccccaaagcccagggcccagtttatcctccgcccgccctgaggagcccaatacctcggaggacagtaagcttggcatggactgtgatctccccaaccgagttctgggccacacactcgtacacgttttcatcccgcggtgtcctcagcggctggatcctcagcactgcccctgcactctcatcaaactcaatcgtctgccatgggcaggggaaaaaagaacagagtgaggctggggtcccaggaaggttcctgtctaggctgggctaggctgggctgtaggggaatggcagtcagccccatgatcctgggggtgactgggagaattgctgcaggctgaatgtgcacgtgtgtcggtgtccagtataaatgcgccgcagacagggaccagatttgggtacatataagaacagggtgttgtgtgcatgtgtgagggtgacaaatgtctgcaagcccatgtgacaggcatgcaaaggcatgtgaagacatgcggaatgtgtcaatgtgcacgtgtgatcatgggcgtgtattgagagttgtaaagttccttctgtgtgcagtggtgctgtgtacactgcactgtgaagaagactcagagagggcagggctttgcttgaggccacacagcatggagctggtagagcaagtaaggcgggcagggccctggctggaggctgcgcagccatgcttgcttggccacagatgatgctccacctggggaacgtgtccacgaagtccactgtggctgaggtgctgtggccctgccttgggggagcattgaccccaggctgcctccccctaccccaactcacctcaaagcgctgagagttgaccttcttgcccttcttgttccaggtcactcgtggcttggggtcacccgtggcctgacacacgaaagaggccacaccccccgacacgccgatctggtccttgggttctttgataaacctggggggctctggggatacagtggaaagaagggggggcgctgatgggtccaggcatctggctaggataccaaggagccacgaaaacctgcattccatgccctgcccacggaagtgccatgtggccaatgaagagaggaggaggaaagcaaggatgacaacaaacaccctcccacctcgccccccaccacggcacccatgggcacccaggtgcccacatatccccacttccacctgcaacagccacacctgctcacacacagtggatacaacctcacctgggcacacctgctcagacacagtggatacaacctcacctgggcacacctgctcagacacagtgccactgggaaagatggaaggggaaacctgtgagatgctggggtccctaaattcagcacctgaaccccccctccatggtgaccagccaaaccctggagggccctgaaagcacttgccagaataacttggtctaatttcctggtgagacatgtggggaaactgaggcacccagcatgggggcggggggtgaccatgggacatgaggtcagagccagtatttgaacccagagctccagcttcttgggaggcatccaggaggtggctggacacgaggggtcagtgcccaggagagtgctctgagctggaggcaggagctcagaaaggggaagtaatatttaatatttaacctctccaacagcatggagaggcagtgccatcctgatcgtcattttcttttcttttttttttttttccagacagtgtctcactctgtcgcccaagctggagtacagtggtgtgatctcggctcactgcaacttctgcctctcaggttcaagcgattctcctgcctcagcctcccgagtagctgggactacaggtgcccaccaccatgcccggctaactttttgtatttttagtagagatggggctttaccatgttaaccaggatggtctcggtctcctgacctcatgatctgcctgccttcgcctcccaaagtgctgggattacaggcatgagccgctgcacccagccttcttttctttttcttttctttttttttttcctgagagatagggattcactctgtcacccaggctggagtgcagtggcacggtcttggctcactgcagcctagacctcccaggctcaagcaatcctcccaccttggcctcccaagtagctgggactacaggtgaaggccatcacatctgtaaccccagcactttgggaggctgaggccggaggatcacctgaggtcagcagttcgagaccagcctgaccaacatggtgaaaccccgtctctactaaggaaacaaacattagccagacatagtggtgggcacctgtaatcccaactacttggcaggctgaggcagaagaattgcttgaacctgggagatggaggctgcagtgagccaagatcatggcaccacacttcaacctgggcgacagagtgagactccgtctcaaaaaacaaaaacaaaaacaaaaaccagcctggggtctcactatgttgcccaggctggtctggaactcctggcctcaagtgatcctcccaccttggcctcccaagtagctatgttgtccagcctggtctcaaactcctagcctcgagcaatcctcccacttcagcctcccaagctgctggatttataggcgtcaaccaccatacccagctctgccatccccattttacatgtgaggaaactgagacacaaaccaggcaagggacttgctttggctggacatgcacagccaggcggtggctgagctgaacgtgctcctttgaaccagcctggctttcacatccacattcttcaccctccatgacgatctgatgtattcattcagtctctgcaataaagcctggagtaggagtgtttttgtttttgtttttgttttttgagatgaagtgttgctctgtcaccaggccagagtgcagtggtgccatctcggctcaatgcaacctccgcctcccaggttcaagtgattctcctacctctaactcctaagtagctgggattacaggcacgcaccaccacgcctggctaatttttgtatttttagtagagatggggtttcaccatgttggccagggtggtcttgaactcctgacctcaagtgatccacctaccttggcctcccaaagtgctgggattacaggtgtgagccactgcgcctggcctggagtacgtgttttttttttgtttttgttttttttgagacagaatctcactctgttgcccaggctggagtgcagtggtgcgatctcggctcacttcaagctccgcctcccaggttcacaccattctccttcctcagcctcccaaggagctgggactacagatgcccgccacca[185 bp omitted]gcacctgggacaggctacagtatctgtggagaattcattaacattgtttcctttttatcgactatttttacagtaacctttgcatctcccagagggacactagatttccggtcacagtacacagtaatgttacaatgtatcccctaagatga[144 bp omitted]gcctcccaagtagctgggactacaggtacccacagccacgcctggctaatttttttattttttttccccgagggctgcaacatacttacaagagcccttaggaagcagcctatatatccaataaaaaggaactgatcaagtgaatgccaggctatctatgcagcagaatactacataagtataaaaagggggaaaaagc[142 bp omitted]ggtggcaggcacctgtagtcccagctactcgggaggctgaggcaggagaatggagtgaacccaggaggcgaagcttgcagtgagccgagatcgcgccaccgcactccagcctgggcgacagagtgagactccatctcaaaaaaaaaaaaaaggaggaaaagcctcccttcctcggcgctgcctaaggaggtggcagccgtctcctcctcagcatcatggccgccctcagactcctcatgaagcccaagatcgtcaaaaagaggatcaaggcgttcatccggcaccagtcagaccaatatgtcaaaattaagcgttaactgggggaaacccagaggtattgacaacagggttcgcagaacgttcaagggccagatcttgatgcccaacagtggttacgggagcaacaaaaaacaaagcacatgctgcccagtggcttccggaagttcctggtccccagcgtcaaggagctggaagtgctgatgtgcaacaaatctccctgtgctgagatcgctcacagtgtttcctccaagaaacgcaaaaccaacgtggaaagggccgcccagctgccgtcagagtcaccaaccccaatgccaggctgcgcagtgaagaaaatgagtagacggctcgtgtgcatgttttgtgtttaaataaatgtagaaactgccaaaaaaaaaaaaaaaagggagtggggggtgggggaaaggatgcttttttgtttcagacagggactcgctcttctgcccaggctggagtgcaatggcacgaacatacctcactgcagcctcaatctcccaggctcaagcgatcctcccaactcagcctcctgagtaactgggactacagtcacatgccatcacgcccagctaatttttgtactgagttttgccatgttgcccaggctggtctcaaactcctgtcctcaagcgatcctctcacctcgagatgctttttgattacttatttatttatttatttctgcggcagggtctcactccgtcacccaggctcaagtgcagggcgcgatcttggctcactgcaacctccgcctcctgggttcaagtggactcttctgcctcagccgcccaagtagctgggattacaggcacacatcacgcccggctaatttttgtatttttagtagagacagggtttccccatg[137 bp omitted]agatatattattaaatggaggaggtgtgtataagcaagaggtaataaagtgtcgcaaatggtaccgttgtacgattttttaaaatgaaaaaaggggttgggcatggtggctcatacctgtaatcccagcactttgagaggctggggcaggctcactagatcaggagtttgaggcccgcctgaccaacatggtgaaaccccgtctcttctaaaaatacaaaaatcagccaggcgtggtggtgcatgcctgtaatccccgctactcaggaggctgaggcaggagaatcgcttgaacccgggaggtggaggctgcagtgagctcagaccgcaccactgcactccagccggggcaacagaccaaaactctgtctcaaaaaaaaaagaaaaaaggaaaaagggaaagattgtatgtatgtgtagaaacagtgctgcctccagggagctaagtggctggacacagggacagagatttccactttggtacctttttacatgtagaactaaagacaaattgaagaagttatttttatttttatttttattttattttttcttcttcttcttatttttttttacagagacagggtctcactctcacccaaggctggagtgcggtggtgcaatcatagctcactgcagcctcaaactcctgggctccagggatcctctggcctcagtctcctgagtaattggaaccacaggcgcttgctaccacatgcggctaatttttaatcttttgcagagacagggtctcgctatgtttcccaggctggtctggaactcctgggctcaagtgaacctcccatctcggtctcccaaagctctgggattagcagtgtgagccaccgtgcccagctgaagttatctatttttatttttatttttttgagacagagtctcactgtgtcacccaggcgggagtgctgtggcgtgatctcggctcactgcaagcttcacctcccggattcacgccattctcctgcctcagcctcccgagtagctgggactataggcgcccgccacc[185 bp omitted]tgagctgattaaagaaaaaatggagcaaaactttgttttaagtaaaagtttggggtctgaggagaggctgaggtctaacaactcaaacttgagcaacgctaggactttgagcctctacgaccagctagaaaagggtagagtgagtccaggggccacacaggttgaccagaaaagttctggaaagttccagctattcagaagcccagagaggccttaagaaggcccgaggttccaagggtaggtccctgtgggccccaacgcctacccatccatggctcaggctgggctttaaacaaaacagagttcctgccccagtggcctgaccagcctaacctccctcactcaaggctctgctcctgttgatatgaccgtatgtgtgtgctttgagcatctgtcccaaaagtcactagacctggccgggcgtggtggctcatgcctgtaatcccagcactttgggaggctgaggcggatggattacctgaggtcaggagttcaggaccagcctggccaacatgatgaaaccccgtctctactaaaaaaatacaaaaatcagccaggcgtggtggcgggtgcctgtaatcccagctacttgggaggctgaggcaggagaatcgtttgaacccaggaggcagagggtgcagtgggctgacatcctgccattgcattccagcctgggtgacaaaagcaaaactctgtctccaaaacaaaacaaaacaaaaaaatcactagacccaccatgtacaggaatgcacagcctcccttaactttttttttttgtttgttttttgagatggagtctcgctctgttgcccaggctggaatgcagtggcgtaatcttggctcattgcaacctccgcctcccaggttcaagtggttctcctaactcagcctcccaagtagctgggattacaggaacccaccacaacacccagctgattttagtatttttagtagagagggggtttcagcatgttggccaggctggtcgcgaactcctgacctcaaatgatccacccacctcagcctcccaaagtgctgggattacaggtatgaggcgccgcgcctggcccctcaactcttatttatccctctgttgcagcaacagccaatcccactgtac[134 bp omitted]atggtgaaaccccatctctactaaaaatacaaaaattagcccggcatggtggcgcatgcctgtaatcccagctactcgggaggctgaggcaggagaattgcttgaatccaggaggcagaggttgcagtgagctgagatcacgccattgcactccagcctgggggacagggcaagactctgtctcaaaaaacaaaccaccacaaaaaagatcacagagttcagaaataacagcactggaatttgaacccgggtttctgcctccaaagccgacatcttactgtcccttccacatccagaacttgagcctgattagggcagatgttttgctccacattgaggctggggctgccccctccttctggcctcaggaatggtgacccggggccatgcgtcctcagccaaggacatgaggaaaagtcactgtggccgggtcaagaatgttacttctggtaaaaatccctccctctggagctgctggaaggaagggcagaagctggctgagggtagagacgcatccagctgcctgtctgacctagagccagaacacaccccttgccccctccaatccagcaagcaagaccgggcgggtgggtgctacaatcagccactgtctgtgctgttccttcctcccagggtcccgtcctcctcctctcatctggcagcttcaacctcagctcggccagcacctcccctggggagccttcttggattactgcaggcccggtcaggagtcccttatgcccccaccgcagcctgggcgtccccagaacactgggctgagatacctgcttatgtggctctcagcacagaggtcaagggacagccttggttccctgggacctcagacttcttctcggtgtgtggtgacccttgagaaaacggagctcccaacatcactgcctgctctcggatttggaggggttctacctctcggaagcacccccatcactgcagagcagataccctctcggtcttctccaggcagctttgggatctgagccagcctggaagagctgtccctgcccactgagtcccccgttagaaaatgtcttgcaaatgcttgcaatctctcctttggacgaagcttccccacctttttctcagcaaaggggcagagacacaggaaggacacctctggggcttgagggcgccgcgcctgcagctcgagaggcacaaagacacgccatgtgctaagctttatgcctgtggccaggaggagcaaaacaggctcagaaaggtgaagaggcctggcgcagaggctcacacctataatcccagcactttgggaagctgaggcaggcagatcacctgaggtcaagagttcaagaccagcctggccaacatggcaaaaccccatctctaccaaaaatacaaaaattagccaggcctggtggtacacgcctgtaatcccagctacttggaggctgaggcaggagaactgcttgaacctgggaggcagaggctgcagtgggagccgagatcgagcctgggcaacaggacaacagaacaagacttcatctcaaaaaaaaaaaaaaaagaagggacctgcctttggtcacacggcgtgtgatgggcagagacaggattccaacccaggcctacctggctccagtgccttgaaaatcacgcaggctggataaatggggttgggggtctttattgaccacaagtaccgtggatgtccctgtctcttagatgaagagacagaagttcatgtggtattgccaatatcaaaaaagctggaaagggaacccagccctctctggaggcaacgcgcctgagcctcccgctccgtggcctggcttggccccatctctgtttttccatttcagattctgcagacaagaatccagtgccagagctggtgacccacccaccctgtcccctccaaccctgcccggggccagccccacggcatcctgggaaggccccactggacctgaagtggtttctagagcagaaattgttcccctatgcctgtaaccccagcactttctcctgtcaccccagcactttcgcctgtcacaccagcactttcgcctgtaatcccagcactctgggagaccgaggtgggcagaccacctgaggtcaggagttcgagaccagcctggccaatgtggtgaaaccccatctctactaaaaatacaaaaattagcagggcatggtggcgggtgccagtaatcccagctactcgggaggctgaggcacgagaatcacttggacctgggaggtggaggttgcagtgagccgagatcgcaccactgtactccagcccaggagacagaaggagactccgtctcaaaaaaaaaacaaaagaaaagaagaactgaaaggggtcagtactgaaggccagacatccccaatgcaggtgagacaggccaggaagactcaggccctggaggcagccagacagatcacagtgcagctatacctggcttctggtccctgagggagtgtggtcattgggaacttggcctgtgggaccaggcagctcaggttcaaatggccacttctggttgggcacagtggctcactcttgtaatcccagcactttgggaggctgagttgggaggatcgcttaaatctaggagtttgagaccagcctgggcaacatagtaaaaactccatctctgtaagaaatttaaaaacttagccaggccaggcactgggactcacgcctgtaatcccagtactttgggaggctgaggtgggaggattgcttaagctcacgagtttgagaccagtccgggcaacacagtaagaactccatct[212 bp omitted]gaggcaggaggatcgcttgaatctgggaggcggaggttgcagtgagccgagactgcgccaccgcactccagcctgggcgacagagtgagactctgtcacaaaaaattaattaattaaaataaataaataaataaataaataaataaataaataaataaaaattagccaggtcaggcacagtggctcatgcctgcaatcccagcactttgggaggccaaggcgcttcagcccatctttcttttttttctgagacaaggtctggctctgttgcccaggctgagtgcagcggtgcaatcagtttccatagttgtacgacggggatgctgataatcgcattcacctcatcagggtgcggtggctgatctgaatgtataggggcatttactaaaaaacagcatgaggctggatgccgtggctggctcacacctgtaattctagcactttgggaggcagaggcaggtggattgcttgagctcaggagttcgagaccagcctgggcaacacagtgaaaccccatctctacaaaaaattaaaaaaattagccaggcatggtggcccacgcctgtagtcccagctacctgggaggctgaggtgggaggattgcttgagcctgagaagtagaggttgcagtgagctgagatgctgccactgcactccagcctgggtgacagagtgagaccccatctcaaaaggaaaaaacgacaataaaaaaagcagcatgaaaataagaaaaagcgcaaatgaatgaggcaggggtgtatgtctccagtttgttaaccagcagtaatacctacgtttgtggtaacacaggattgccggcctgctatgtccctagcagcaggcaggggcttatgaaatgtccacatcacaagaatgctggatgtggataatgatatgagctctgtgacagtgggtaagggaggctgagccactagcccggggttgtgcagcaggttggcagcagagccaggattcaaacccagcctgactgcagaacccagtctcttgccctactgccctcatcccctatgtcctcatgggcctgagtgatgccttctccaggtccttcatggtggggtgagtcttggcattgggccccagatggaccctcatcctcttcacattacagccagaaatgcttccttgcccatctctaaactataccaacctctttcatctgcaggccttcccgggtgctgtcatcctgacgaggaatggcttttctatcggcgaactcctatacacccacaaaaccccagtcccaatgccctttttcccaagaagcctcccctggctccacctgagacagtttgtctgcctgtgtgtctgccaccaggtgtaggtactgcccacagcaagggaaggtgaactctgtggctcactaagcagtgatctcaaataagtccttgcctcgttttccctcattgggaaacgtggaaggtaacagaactggcacactgggttttgtcaggctcaagggagaggaagcaggtaaaattagtgcttagcatggagcctggggctgagttgatgctggggaaacagacgccgtcatcatcattacggttattactttatgaataccagcattattatttatctctgaatctcttagggctcagcacacagtcctcagcattcagcctcatttgtggagcataaaagttccatttggcaaaatggagggccccagggaggaggtggggagtgtgcccacacacacacagccataaatgcacacaggtaaacaaacacgcagacccctgcacatcccgtgccggcttcttaccttctgctgcacagcctccaacgagcaggaccacaaggaggcccatgggaccaaccacagacaccatgccagggccccaggtgggcgccatgcttggcagcgacctccgatctccgccctggagggggatggccccccggtccctcacagagaggcctcgagccgagcgtcagatggggcaacgtctgcagagacaatggagggctgtgagaggcgagtggggaaatccaggagaccttcatggaggaggcagagggagggtcacatggagcaggggagggtcctgcgggggctggtcatgggacaatggggaaggatcatggggtgatgggatggaatgaaagtgctgggcccttgctatagaattaaggtgtctcccccacaaaaaatcatatgttgaaacctagtccccactatgatggtaacaggagatggagtgtttgggaagtgactaggtcatgagagcagagacctcatgaacgggattagtgtcataaaggatctcccagaaagctcccttgccctttctgccacgtgaggacacagggagaagatgccttccacgaaccagaagatagccctcaccagacaccaaatctgtgttgccttgatcttggacttcccagcctctagaactgtgaggtaccaatttctgtcatttataagccacttggtctgtggtatttggctacagcagcccaaatggactaagacagcctccaaccaccagctaaaccccaaccccagcatgagtccccaacccaggctgggcccctgactcagaccaagccccacaccaggactgaggacctgagcccctgactcagaccaagccccacaccaggactgaggggtgctgagccccagttttctccaactcacaggctgcttctcaggaaggaggggactccagactatgctgctgtctggctctaaaacctgatcccccaggttataagacaaatctcttccacacacctgcctgtccctgccctgctctaagacctcccatggctcccagagcccccaggggaagccactcttgctgacttcactgtttcctctcgcttggaggtacagccaggccagccaagctcagtcccacctccaagcctttgcttctgctgtgccctctgcctggaatgctgtccccaccacatgacaggtctcagcttagctgtcacttcctcaggaaacccttctctgcccctcaaaggtcaattccccctacattctacatcccggagcatcagatatgactaaggttatcctccgtggtattcaccctggttcccaaactaaatgaaaagatgttaatcattcagcacgtttctcccacaagaacctcaactcctccagggcagaagggtccctcgtcacataccttgaaccctggaatggccccctccccatctccccaatctccactctgtccagagccaggtcagagggccagggaggggaagggagaggcccaaggataagatctttgttgcctagtcaggctggcacccatgccagcccatgccctgggcgggtccaggccgtgaccacaggaactggtggcgcataataacggggcagcccctgtgattctgactcccaaaatacccagctgcggtcacctcgcccagccctggggcggtcccaggggaaggatgggcgggtagtggccgggtcacagcctagggtgacgaacgggattcggggggcctcagtgtacatagttaggccacaggcatacagtcagaccagccacagagaacgatgcctgctaaatcacgccacagacatacacagatgcacacagtcaaaccaccgatacacaccgacacacagtcagactgcaagcggttgcatatctgcaagagacacagaaacaaatgcattcacacagtcaggcagcagagacgggcacacacacacacacacacacacacacacacacacacacacacacaatcaggcaaataaaacttgcacatagtcagaccacaaacacagacaggcccaaaatcagaccacagacatacaccaagccagaaaagatacacataaggggtcatggtggggcaggcagtacacatacacagttgggttacagggaactgcaaacatgcaattagatcagagatacctacaggtgcacaagccggtcaaagtcacacgcagacacaggtgccggcacactgtcagactatagataggccagtcagtcagcagaccacaggtgcatgtgccagccagccaaatagagatatgcaaagtcagattcccttcctacacacatatgtgcacacaggcaggctacacagacatgcacacacacagtcagactctaggtacaccttgcacacaaccagttggggactgggaagatgaaggaaataaagcctagagcacagtcccttactctgagtccctgccctagccctttaagagcaaaagttgccaacgaggaaggcggtggccccagatggagaaaacagcctgtggccagctggggctagggtgaccacagcggctggccctgcccagaaatgcacatctgcttggccacactgagggggcgaggtcagtcccagaccactttgagcagctgggcaggcctgcagagagcctctggggaaactgaggcagcatagcaaacctgaagctcagagggcatgggtaggagtcacttgcacagagagcccaggtggggcacatatatggagggccccagccacagctggctctcccacatcccacgaggacctcagggcagcatcagccaccttctaaaccaggcagccctaattacaccctggctcccacggcagaagccatgttgggcccacacctccctgatgtctgcgcaggatggggctgagtcaggcacagacaggcagggcctggccatggactccccccagatccgccactccagcctgtcaggggcagggacgaggggctacagtaacaggagcatttggggcattggatgatgtatcaggaatagggtggtgggaggggcccagggagtggggttcagacactaccaaagacaaaacatcccggggtcccttaggtgccaatcctccctaggagaacctcccatgatggggataggaccctgcacacccacaatcctcccaccgactcctgcttccacgaaaaccccaggcgtgaggtcctctgcgaggatttgggagagaagatccctaggtcccatcagctctgccttcagaatctgtccccaacctgcccacttcttactcattcttctgcctccacttcttccagccccattgtcaccgacctggacagatgtcgtcacctccatcgtggtctcccagctcccgcccttgtcccttgatctgttccactcacagaaaccagaaagcatctgcaagcacccgagtcagggctcgtccttcctctgcccacagccctccatggctcccacctgcctcggggtcaaagcccaagtccttcctgaggcccaccaggtcctgcacgacctgccctgtcccctccgtgccctcccctcctccctttctccccctcctccctctgctccagccgcatgggcctccttgctatttctccaacaccccaagtgcagtccagtcctgcccccgggcctttgcgtgggccattcctggatttaatattggctgaggaccaaaaggtgaatgggaattgggggcaagggtgtctctgcactacaaacagcatgaggaagagcaagggggcagcactgagaggtcctaggagggagagggggagagatgaggacagagaggtgcacatagactagacccacagagcagccaggagccctacgtggccctgggcagggagggaaatggccaggttggtgccaggccaaccctccaccatgtcctcttgcaaaaggcagcctgggccaccagccttgccactgccaagaaagggaaattaagtcaggtgcagtaatctgcaagctcccagtaaatgacacggctgttaggaaaagcatggcagcccatggtggccagcgaggctgagccagggctagggagaaggagagggagtgaccgctggacgctgaacccatgtggggctcagggagggtctctgcccgccccacctggctctcaggggctgcactgcccaccactagctcacggcagctggtcagaggcaggcgcttgacttttacagatgaggaaactgaggctcacagaaaaacagggactcagccaaggcccccagctggggtgggacttgggtctagagcccacgtttaatcttgtgactgtgtctttctctggccactgcgagatctctggacaactctctctgggactggtagagcccgctggccgcctctgggggctcccccgcggtgctaatggggggcgagtgggcactcattccaaccaggcgccggggcatgggtcacgcgatctgggagccggctttgtgtgcccacgcggtccaggaagcataaaggggtgattatgacccaggccgggcagcaaacaggctgtgtcacccgcacgaggcgggggctcctcgggccagaggaggctcccggtgcctctcccagcccaggctccagctgtagagtccatgctgccctgtcctggggcgggagtctgggggcctagtcctaaccctcaggggccatcccatggccccagggcaggagaagctgaggctgattatgccagcagtgggactcaggggaaagacccctgaccctgcacaatctctccaccttcacatccaccccccacccacagctctcccgtgccaccgcctggaacgtcatttccaggactggaccctggcctccagcctccctggacacctgggtcactcccacatccactcaagcagggacaggcagcgagggcccccctgggcagcaagcacaggctctgtggccactggtgggctcaagtcagctctggccaagccactgtccctcccagggcgccattatctccctatcaggaaatgggctcagggaggggctgggtggggctggcccttcccggaactgaagtccggggacctggctttaattgactattgatttgtattgggacgacgtgaaggctcagggcactgtccccaggggtcctggtggccaggagtggatgggtggggcagacagggaaccaggcccagccctggagagggaaatcattaaagtccactgggtgcctctggggtgctgagccccattaaatgttctctgtgttttctgctgtttaacggattaggaaaccgaggctcaccaagggtcctgcatggaggagggggctgggctgggttaggatttgaggccagagcccggctctcagtcgagcccagagtccacatcctctgggcgcccaggctgccaaaattgcccgtcagtgtgtcccccatgctggcttcatggaacaacttgagacgccaagatctgggggtacccctgcttctgctcacacacccacgggggctcccagctcctgtgctcgctgctctgggcccttcttgatgtgactgcatccatcgtcttccctaccccctcttcccgaaaggtcctgcagttctcagaatacactgcctcaggtctctgagcctcttcgcatgcaggtcccccacctggcacacccttccccagctggcccatggtcagttcatcctgtaagctgcagccacgagatgcctccactccaagctgagccccgttcctcctctgctctaaaaccctccatggctcccatcaacacgtattaaaactcagactgctacctcagcctccagagctgccagcccggcctctgctgacctcatcacgccacaaccccccatgccaggcttcccttgacaccttgatcccccccacttgtggcccctggctcccacaggggtatttacacacactgttccttccacccagcataccctttcacatcctcatcaaatctcagccctcatacttgtcctcagggctcagctgagctgtcacctcttccaagaagccctcctggatgccccagggtggatcaagacccattctgagctaccccatcacagctgtgctcccactgtgggtctgtcaaccccctggatggaagcccttttcccaccccaggaacgtggcaaagcccctgcatgcactggatgcctgctgcataaccagctccacctggcactttatccacagcatccctggcgtcacctgggtttcagaggtagaaactgagaccatagacagagaccaccccaggcaatggagaccgagacggggacagcctcgcatccaccctagggggtctggcagagacttaaagggtgggggtgaggctctggaaggaacagacagctgaggccagcctgggttctgcaggaagccccttggggagggtcaccaaactctgtcagctcagtacttgggtcctggaacggcttagagcccagggacgggaatgggtaaaagaaaggtacgagctgccctgaccgtctcagaagacaacaccacaggcccctccctgaggccaagccccccagtttcttaaagccccccaacaaagcacagaggcaacgtggggtccacaggcccgagaggagcggaaacaaatggatggaggtaaacttcctgcgattttcgggggtggctaagagcagggattcctgccatgcaccccccaccgctacctgccccctctgcggtcctgttgcctcctccgccttctgcgaagtccccagtcacagctcccccgggctggcagcgaaggctgccccgcgcctggctccgcccccgggaggtgggggaggagagggggtggggggaggaggtcgggctgggggccaggcgggggaggggaccctgcggagcataacggtctggagttttccaaagtgcaagcgacgggcctgaatgggggggcgccaggcagcagcaggcccaagctggccctggagggcggccggcacggtcaggcccgcgctgggctgtggggacccccgtggtccccagcctcggagcctggagggggcgcgacaagagagacaaagcccggggcggcccgggcctcggggtggaagggggtcccgggcgcactcaccccgcggctcggagatcgggcccaggccccgcgaggcctccacagggcccgccgcagccgctccccgcgtccctcggtccgcccggagcgcggcgcgcagcgaagactcgggagaggcctcggcctggggagctcggcctgggggcggggcaaggggcggggctgtagggggcggggttgcagtgggcggggctgcaggggacgggccccgaggagggggattggggggcagggcggggccccggccggaagtggggcggggggaccagaggggagccccatctggaggcgcggagagcctccgcaggagtccatgaaacactgagcgaaggggcgccccagggagggcacgacccaagacccctccctcccgaagacgtctcacggggagcctctacactgctcctcgcttccccagctctgatcgtagccatggcaacgcatgaggaggctggatgccggacagggcggcggagggctccccaaacacacccaactacaggaggtcggagaaggggcagagttcccctcccagtctgggtgggaccggaggcacggtgatgggggcggggggcgtcccctcttccccctcttagaccagagggtaggggagaggtgcgggcgcagaggcttccctcccgctgggggtccaggggaatgaatggggggacaccgtggcagaggcccccaccctcgccacaagcctgaggagggggcggagagcacagggccagattggaaacagatggggccgccgtgccaggcccgcgacaccggagcagagggagaggaggagggagagggaggggcagacctgtccgggcggccaatccgagccagcgttgcgcccggggtgcgggtttgaaaactccaccggaggggcccggaatgtagaagcccagcgggacctgggggtctggggacgggacaggggcagaggccgggatggagacccaagggctcccgcgtctgctcccatccctggaaaaaacgcctctcttcccagcattcgcgctgaggacgaagcccgaacgccaacgccaacgggatgtcctgggcgctcagctgccatcagctgtgcttcctcaggccaccggccacggctctaggaggcagaccccaccatcacccccattctgcaaagaacggagccgagaaagagagagaaacggctgcccacggccgggaagagcaggaattggaaccagggtttgggtccagaggaggagctctcaccacagcgctgctggaggcctggggcccccggaactgaggatatatcatgaataatttcaagccccttgggtttatctaggtacagggccatcctgaagacagacgccccactctctagaagccattactcagtggggcaaaggacgtgggctttgatgggagacacacaggcggctgtgagagcccagcagaaacaattccgctcccacggctcccgtccatgccctcccactgctacctcagtggctggctcccatctccttcaaacatcgaataaatgcctccctcactgggggataccacactgcccccttcccttaccatgcctcagtttccctcctctgcaaaatggagcatggaatcgccccgccccatctccaacaataggtggcctagtccacaaagcaccatgcacagtaggtggtctgtgagtgtctgcacacaggctccctgcctgcccctttgacacagagcacacaggaggtgctaaacacaggatgccgtgacgtcccccgtcccacgcagccccatcctcgacgaggtacacagtaggtgcttcatggaggaggctgcctggtgccccagcatcaccaaaggcacacaggaggttccctgtgtcaatgtaggcgtaggagcaaccagcgtgacctccccaacttggctgggcacacagtgggccctcaggagcagagtaggcaccttgcttgtatctgtggcaaggcacggggctcatacagactcgagtttgaatccagggatgccccgtgtgtcaagaaagcacccgtacctctcgggccgacagtttccccatctgccacataagccaagcactgaacaggtgctcaatgaatccacactgtcaggaggcttggggctgcatgacctgcagcatacaggcctggctctgggctgcccaggactcgggacggcagacaagggcttgccagccgcttcccagccagtcctgccctctctgggcctcttgtccatgtctctgtggaggcagactcttgcccctattccacagtggtgactgcagttggcaggggacacagccacccccgaggggctgggggaggtgggccaggtgccctcccccttggctgggtggccccatcagcacagagccctacatgcgcctagtccccgggtctgcctctcccaccagactgtgacctcaggaggcagagcaggatttgtctcggtcacccagtgtccccagcacctagcacaggtccacagtacaaaggaggttctcagcaaacatttgcacaatcaggcccagcctcacccaggagagcccctccgaccttattctcctccaaaggccacactgtgtgtgcccttgtcataaagcaggcatcttcacctacccttttttcaagacagggtctcgctctgttgctcaggctggagtgcagtggcaccatcatggctcactctagcctcaacctcctgggctcaacctcctgggctcaagtgatcctcccacctcagcctcctgagtagcttggactacaggcacatgccaccacgtctggctaatttttggatttttttgtagacatgggatctccccatgttgccccgactggtctcgaactcctagactcaagtgaacctcctgcctcagcctcccaaagtgctgggatcacagacatgagcccgtaataaggttaagcccagcctacccttttctaaacaaacatttccaagccccgatgccaggcacaatcctagacacacagtgaccaagactgacaaagatccctgccctcagggtgtggatgctctaaagagggtgacacatgagaaacaaaagaaatcaaatccactgtgggtcagatggtggtaagggccctgaggatgattgggttcagggttgtaggatgaggagggaggatcgcctgaggccaggagtttgagaccagcctgggcaatatagcccatcatctctacaaaaacttttaaaaattagctgggcctggtggcgcatgactgtggttccagctacttgggaggctgagggcggaagcatcgcttgaggccaggaagttgaggctgcagtgagctaggatggtgccactgcagtccagcctgggcgacagagcgagactctatctctaaaaaaatgtaaaataaaataaacacaggataggagagaggggaggtgacatgcgaacaaagaccaggagaaggtgagagaaagtgaaagaggattccaggcagagagctcagtccatgcaaaggccccggggcagcactgcacctggcgtgttggaggaatggcgaggaggccagtgttgctggagcagagtgaggaaggggagacaaagaggaggggaggggagggaggggagggaaggaatggggacaagatgcgcacggcctcagaggcctccaggaggaattgggctttgaccctgaggaaggtgggagccatggagggctgtgggtagaggaaggccctgactcaggtactcacagacatgctcagctgctgtggggagggcagactgtgggggatgactaggctggggctggactgggtagaggatgagggagaaaggcacattctaggcagacccaatagaattttctaaacggctcatttggggatgtacagaaaagaggggactcaaggatgacttctgggtttttggcctgagcaccctaaaggttaagggtggccacctccaggaagccctccctgattgccccgcctactccgtgcccttgggggctgacccctggacccctccaaaaacgttccattgatatgtcctctgtatacacccaggaggcggctgcccttggggaggaacacggggctggatcacgtcagctcccacagctgggacgttggggggtaatttttttcaaaataacttttcttctaattataaaataggcgcgtgcagcagaaaattaggtaaaatcagcataaagaagaaaataaaagttacccacaatccatccctcgcctagagagaaactgtttcatgcggccgttctcattcattctttccctgtacatgtgctgagcacctactgtgtgctgtgctgaggacacagtggtaagcatgatggaaccagcactcctgcccctgttggggggcacagactagttgcaggggggatggacacccacagaaaaacaaacactgtcaataacataaggccgggcagtgctaagagatgccaaaaataattaaataaaccacactgcaaggctgcaaaaactggggggtccctgggggagcctcttagaagtggtgataattgcatttacacctggaggaagagagcaaatcagacatacaaacacctatgacaacagagttgcaggcaggaggaacagcaaa[133 bp omitted]ctctgcctcccgggttcacacaattctcctgcctcagcctcctgagtagctgggattacaggcgcacaccaccacgcccggctaattttttgggtatttttagtagagacagggtttcactatgttggccagactggtctcaaactcctgacctcatgatccgcccgcctcggcctcccaaagtgttgggattacaggcgtgagccacagcgcccggcctccttccagtctttcttctatgcatacgaatgggtgcttttctttcgttcgatggggatcaccattagcagaccatgttccagtgtccgggtcacagaatttaatcaattcccacttgtttatcccattatgtcccttataaacaacactgtgagggacattcttagacacagctgtgtcccttcgtctcctgaagaaacttccaaagcaggggtgactgcattgggatgttctcaagcctttaaaccttccctgatggggaaccctcagataaaaccatacccttgaccggggcaggaccccctcccccagcctgtctgtcccacctccttcatatttggcaccaaaacccccagacatttcatttaggtacaaactctgtactcttggctgtgagagccagagagaaactggttgggcagcttcctctcagcttccctgccctggtcttgcccatgcccaaggctcccgcctcctacctagcacagcattcatgacccggggcatgggcgggtgccaaccagccaggagcccgcctcacccatgttcacatcacagccctggcgccgggtctacccgccagccgcaccgcagcgggcatgatgcccaccacaggcacgccccagctccatgtctgcctttttcacctgtccgcccccgcaggccaggctaccttccccttcctggaaaatgtgtgacaccttcaggcatggctggatccagcaaagccattcctcccatgtcttccccaactctgctgatagcagctctgtccttccaggggctcaggctagaacctggaagctggccctcactgcttttcctccctcaccccatatggtgttggtctggaaatactctcacgtttgtctcctaaatttctactcactttgtccatctttctccatattcccttcccaacccatccagcctgatcattgcctgctcggaccagcacagtcacctctgccctggtccccagcctcccaccctcgccctccagtctgtcctccccacagcacccactacatggtgccggtgtgcacctgagtcaggtcccgtccctcctctgcccacagccctccatggctcccacctccctcagggtcaaagcccaagtcctcctggtggcccacaaggccctgcatgacctgctccatctcctccctgccctccattcctccctctctccccctcactctgctccagctacatgggcctcctcgctgttcctccagcaccccaagtgcagtcctgcctcagggcctttgcacaggctatgcctctgcctggaacactgttcctctacattttcttgtcacttttcttctcacccttccattctccctcaaggatcacctcctcagaaatgccctggctgaccacctggctcaagcagcacccatcacccattacccattattttactgtcacctgaaattctctgtctttactcactgtctgggtctgagttatcaaatacaagaaccactagtggctgggtgtggtggctcacgcctgtaatcctagcactttgggaggccaagatgggtggatcttctgaggtcaggagtttgagaccaacctggccaacacggtgaaaccccatctctactaaaaatacaaaaattagccgggcatggtggtgcgcacctgtaatcccagctactcggggctgaggcaggagaatcgcttgaacctgggaggcggaggttgcagtgagctgagatcgcgccattgcactccagcctgggcaacaagagtgaaactctgcttcgaaataaaataaaataaaggaaaagaaaaagaaaaaggaccactagccacatgtgactcattaaacttaaatgaagaaaaattaaataggccgggtgccatggctcccacctgtaatcccagcattttgggaggccaaagtgggtggattgcttgatgccaggagtttgagaccagcctggacaacatggcaaaaccccatctctactaaaaacacaaaaattagctgagtgtggtggtgcacacctgtagccttagctacatgggaggctgaggcatgagaattgctagaacccaggaggtggacactgcagtgacgtgagatcatgccacagcactacagcctgggcaacggggcgagactccatctcaaaaaaaaaaaaaagaaaagaaaaagaaaaattaaataaaatttaaaattctgctcctcaagtcacaccggccacatttccagtgtggctcatggtcagagtactgaaacccacatagcacacttccatcactgcagaaagttctgtggccagctctcccagcaacaaaggggccaggtcagtcttggtcactgccagggtcgagtacacagtatatgctcaataaatgctttctaaatgaagaagtggggcgggtgtggtggcttacacctgtaatcccaacactttgggaggccgaggtggacagatgacttgagcctgggtttttgagaccagcctgggcaatatagtgagaccccatctcaccaaaaaataccaaaattagccgggcatggtggtgcatgcctgtaatcccagctacttgggaggctgaggcaggattgcttgagcccaagaggcagaggttgcagtaagctgaaattgtgccactgcactccagcctgggtgatagaacaagactccgtctcaaaaaaaaaaaaaaaaaagaaaagaaaagaaagaaaaagcggtaaaatatatataacaaaaaaatttccataaaaaatatagacatgaaagagtgaagacatcaatggctcagaggccttgcagagactagaggtgctggccaatagcacagaggtcagcaggtgccatctgcagccacagtaccctggccactctcactccctgggcagccacgttagggtatccaaactctacatttccaacatagtgacatggaaagccagaaagcaaaagccacattgctgggctttgaacctggatctccctggctggccagcaaagcatcctctgggagctcttgctccagccccaagggcagaaacttggaaaaggcttccaggccacagccggagtcagctctgcagcgccaacatgctgactcagccaaaagtggaggacgggggagggacagaatggccggtccccccgccaggccccattgccagcctgggcccctgcc[137 bp omitted]tcccaggttcaatcgattctcctgcctcagcctcccgattagctgggattacaggtgcccaccaccatgcttggctattttttgtatttttagtagagacagggtttcaccatattggtcaggctggtcttgaactcctgacctcaggtgatccactcgcctcagcctcccaaagtgccaggattacatgcatgagcctccacacctggctgtaaatgcatttaatggatctggccacatcctctctgcaagatgcctgctggtctctccttcaagcgcatcctccccctctacacccaccagtccccaggaagggtgatcacagtctccccccaatcctcccctccttgctcatgactctgccatgtcccaataccccccattgattggatgatggatggagtctcactctgtcgctcaggctggagtgtagcgcggcaatctcagctcactgcaacctccgcttcctgggttcaagtgattctcccacttcagcctcctgagtagctggggttacaggtacatgccaccacacccagctaatttctgtatttttagtagagacggggtttcaccatgttggcaaggctggtcttgaactcctgacctcaaatgatccgccttgccttggccctccgaagtgctaggattacaggtgtgagccaccacacttggccccccgatttaatcattcatgtaggctgggcacggccagccttgggaggccaaggcaggaggatcgtttgagccagaacttaagatcaacctgggcaacaaagagagacccccgtctctaaaaaaaattaaaaattagctgggcatggcagtacatgtctgtactcccaactacttgggaggctgaggcaggaggattgcttgtgaccaggagtttgaggttgcaggtgagctaagatcccgccactaaacaccagcttgggtgacagagggaggccctgtctagaaacaacaactttcatgccactgtctcccgtcttttccttaaaccaatttacttaagaaactaattcaacagtatcgcatatctctaaggaagacccaaaagattctgccctgccttgaaagtcaccagaaacattgttacaatgaaaatagtacccagttatcccatggtcgctggatactgttgcgaacaccagcagccggatgggattttgttacaaagagattggcaggtgttagtgtctgagatcaccctgaatctccctgggctttcttccctgacgtgttaggagctgaaagggagtcattgctggtgtgtgcagctctgggctgccggatgcctcctccagaggccacccccaaacagcccc[136 bp omitted]acagtgaaaccccatctctactaaaaatacaaaaaaaaaaaaaaaaaaattagccaggtgtggtggcgggcgcctgtagtcccagctactcgggaggctgaggcaggagaatggtgtgaacccaggaggcagagcttgcagtgagccgagatggcaccactgcactccagcctgggcgacagagagagaccccgtctcaaaaacaaaaacaaaaacaaaaaaagacaacaacaacaaaaaaccgtggctcacaggaggcaggaagcccaagttctcttcccaagggagctgtgtgggcctgaaccagtcctcaccactctctgggactcagtttccccatctaagcaccagggaaaatgggctcttggtgcccggggctgatttttgtgggtctgaagtctgtaaagatcaaggaaaccgaggcacaaaccagggaggtctccaaggcagggcttggtgtagctcctaattcctcctggtccccgtgcacaagggtgggatctggttttggtcacagctgaaactccagcacctactgtgtgctagagctgtcttgagtgctggggacacagtacagatcaaggcagataacctctcagggcttctgttctggggagacagcgacagatggggatagaggacaggggcagaggacacagcacgtgtaaaggccccgaggtgggaacgaacacactaagttctggaaaaagagagggggactggtgcagagaggggggctggtccagagagcgggcagagtgagtgagcaggggcaggatttgaggggtaataggagtgaggaccacggtggctcacacctggaatcccagcactttgggagaccaaggcaggtggatcacttgaggtcagtagttcaagaccagcctggccaacatggtgaaaccctgtctctactaaaaatacaaaaaattagctgggtgtggtggtatgcgcctgtaatcccagctactcaggaggctgagacaggagaatcgcttgaacccgggatacggaggttactgtgagccaagatcacaccactgcactccagcctgggtgacacagcgagactctgtctcaaaaaataataataacaataaaataaacagaagcgcggagggctatggccctccatgccatgtcagcatttgaggaatgaaaaactgtcacaccccagtaatgattcgtctctcagcatccctctagcatttataaggcacctactgtataccaggctctgggctgagcactaaggacacaagatgactgtgggaggcagacagggggccctggaagttaaaggccaggtcttggccaggcgtggtagctcacacttgtaatcctaacacattgggaggccgaggcaggcagatcacaaggtcaggagtttgagaccagcctggccaacatggtgaaacctccatctctactaaaaaaaataagaaataaaaaaataaaaatagccaggcgtggtggcatatgcctgtaatcccagctacttgggaagctgaggcaggaggatcgcttgaatccaggaggtagaggttgcgagctgagatcacaccattgcactccagcctgggcgaaaagaaactctgtctcaaaaaaataaaataaaaatacaaaaattagccaggcatggtggtgcacgcctgtagtcccagctactcaggaagctaaggtgagagaatcacttgaacccgggaggtggaggttgcagtgagctgcgatcatgccactgctctcctgtctgggtgatagggggagactccgtttctaaaaacaaaaagcaaacaaaaagagatcagggctgtaatgggggatgtcgcaaggcttccaggaagaggtgatgtctaagatgagaaggatgggagaaattgcgctgggctggggcagggaggttggggagtgggaagggtgtcccaggtagaaggaacagcatatgccaaggtctggaggcaagagaggtgtggaagaggaaacctaactagccctgaacaaaacagaaaaggagagggtggggaccctgggccaggtcccatcccatgggagaggcaactgagggacatggggggctggtgagggggggtggggtggcagaacttcccactacccccccagagctcaggtgggggcatgacctctctaggtggctccccaagctctcaggtcctgggtaggagaaggtggtctctctgaacaggtgttaggatctacacccaaccccatctccccaagacataaaaacccctatcaagcacttagcaggagcaaaacactcagaactgagctgggcatacagcaggtgctcagtgagcacatcagctattattccaggcttttcccaccatccaggcacacttactaaattctcctcagaacagctattatttgccgagcatggtggctcatgcctgtgatccctgcactttgggaggctgagaaaggaggaccacttgaggccaggagttgaagaccaacttgggcaacacagcgagaccctgtctctacaaaaaaatacaaaaattagccaggcagggtgaggcatgcctgtggttgtagctactcaggaggctgaagcaggaggatcacttgagccttggaggtcgaggctgcagtgagctataatagtgccactgcactccagcctgggtgacagagaatgagaccctatctcagacaaacaaacaaaaaaatccttgtgcctagaagctggacacggtggctcatgcctctaatcccggcactttgggaggctgaagtggtaggacagcttgagcccaggagtttgaggctgcagtgagtgatgatcctgccactgcactccagcctgggtgacagagggagaccccgtctctgaaaaataaataaataaatatatatatatatatatattttttttttaaaggcaaattccaattagccgggcgtggtggcaggcacctgtggtcccagctacttgggaggc[137 bp omitted]attcctcatgcctggaacagagagaaccagcagcacaataggtacaaatacttgaggaagggagggagtccctctaatgctcccctggaagcaacctctgccattaccatctatctttgtgtctttttctcatgaagttattgatcaaaggtaactctagaatacagggtgattttttttttttttgagacggagtctcactctgtcacccaggctggagtacagcggcacaatctcagctcactgcaacctccgcttcctgggttccagtcattctcctgcctc[213 bp omitted]gatattctgttcgaatcatggctgttcctcacatgacttgtaactactgagcacacgcagcccaggcctcttctcgcctgtggtaggatcttccgtggcaaggctgtgccttgggcgtttatcacccaattccctgtggacacttcggttgcctccattttttcccaacctcacccaatgccatggtgaatctccatgctgacatctcccaggtccccttggggaagcatttttgtctctcactggtgtccagtgaagggcagctggggtggaaggtcgggttacagcttgttctaaacaagcaggttcccctcctacacagtcggaaatgagtaggtcctaatagtccccgaggagacaattggctattatcttccgaagttaagtttatacattccctttaggcctgataacaccacctctagaaatctacccggcagacactttcccgtgaaatgacacgtggagaaagtactcacggcaaaaggcttgaagcaacctgaatgtctatcgataggagattggttaagtaaagaacagtacaagggggccaggcacagtggctcacgcctgcaatcccagcactttgggaggctgaggcaggaagatcacctgaggtcaagaattcgagaccagcctggccaacatggcaaaactctgtctctactaaaaatacaaaaaaaattagccaggtgtggtggccggcacctgtaatcccagcaactcgggatgctgaggcaggagaattgcttgaactcaggaggcagaggctatagtgagctgagatcatgccattgcactctagcctggccaataaaagcgaaactccatttcaaaaatataaatacataaatgaatgaatgaataaataaataaaaataacagtacaagaggtcaaataatgatcgaagagattagtatcttagtgttatgagatcagtatctcttagtgttatgagatcagtatcacagctgtgaaaaggaatgagaataccagatgtacaattataaaattacttttaagatactatatttttaagtgggggggaagaaaacaaggtacagaacagcatgtagaagatgctgccatttggttaaacaagggaatataaatccagccgcctactaaatgttcacagaagatttctagataaactgcgctcttcaaaaccgtagccacgagccgtatgtggctgtttaaatttaaacggaataaaatggaataaaatttaaaattcagttcctcggttgcactggacacatttcaaacgctcaatagccacattcggctcagggcgactgtaccacggtgcgtagacggagaccatttttatcatcgccatatcgggggccaaatccggcccaccgtttgtttttataaataaagctttattggcacatagccacgcccaccagtttacgtgtttgtctatggctgctttcacgctccaatggcggggttgagtagtagacagagatcatccggccggcaaagctggaaagatttacaaggtggtcctttatggaaaaactctactgaccctgttctgggaagagactgctactggggaaagagagaggggagaggatctggagattctccaccatgcatttttctctgcatcctcaattgtatcccatgtgtacgcattctctggccagaacaacatattaaaaataaaagacgtggtgtcacagagatgccgatttcttctcctgccagccacgcccggagggcctggttcccctcgacgctgccaccctggataataccacacttcaaacagttttgctaaatggatgggtgagaaatgatatcttgttttaatttgcatctcctgggcaggagatgggaactctttaactatagataaatgcccgtctaatcatccatcgtccccccagactccttaagggcaaggattgtctgcatcagtcactatagtgtccccagtcccagcatggggccaagcaaacagctgaagcccagtacatccacacggaagagagggaatcaggcccagggcagcagccacagtgcaaggcctgggctagttgtggctggtggtgagcatcgagtgccaagccaagcttcaccgacgcagtcacaggggcagactccatgcggcagaggtggctgccagcccctcggggaacctgcagactcacgttcagcagtgggggaagagagcagggtgggcagggacctggcagccttgggggtaggggaactgtgggctccaggcggggagagagattatatattcatcagaatcttaaacaaaagccccgcagccgcctgtcagccaggctatggcttttatggtaatcagcaatgaattacccacaatgcctggccaagcgcaagtggttcttggcccggatcctaaactaatttttgtatgttcgtgtgtatataattttgctcgctccctcccgttcctctcccttcattaccaggagcacgggtggggtacggggcagggaggcaaaaggaaccctgggtgtagaagtggaggatgctcaccaagaccccctggccctacagcctgcctggcactaggccctgggctcagagtgtgtggaggtgggaggtgagtgccaagtgggaactgaggggagcctggaaaccaccaaaaactggagctggcagctccgggggtggagagagaagggaggaagggggggttggctggctctggtggtgagcagagtgtgcaggccccttagtggggttgagcctgtgccacgtgctgtgtggccttgggcaagtgccttaacctctctgggcttcagccccctggtctgcaaattagacctcccttcctgtcctaacctctagccccatccagccccaagtgtgtagcccacagcccctcccagggccctgtctatgcaggccactctctaagtgcttgacgcatattaactcgttttgttgtgccagttatttatctcagatggggaaactgaggctgaggataggatgtgccttgtccagagccaatggcttgcttgtagcacctgaaaacccgctatgggctaagtcaggagctgccaactccatgtctccagggagaaccagcccaccacttcctgggaacctccgcaggcgtcctgctaatgggggcgtttccatgcctgcctctctcaccatcttcgccacctcagctcatcttctccgtctttaccgatgttcaggacagaggcctgggagtcgttcttgactcatctcaaccctaccctgcagccaaccacttggagaagccagccaacccttctgcaaaatccttctagaatacaacccctcctctgcccctgcctggtccacccccatcatccctggcctggatctgtgccgtcccctctgctctggtcccccagcgtctgcactcatcccccacagtctgtcctttctgcaacagccaggggtcgcctgtgaacacgtcggtcagggctggttcctcctttgcccatagccctccctggctcccacctccctcagagtaaacgcccaagtcctcctggtgccccacaagggcctgcacaacctgctctgtcctctccctgctctcccctcccctcctccccctcctcactctgctccagccacacaggcctcctcgctgttcctccaacatgccaggtgcggtcctgcctcagggcctttgcacgggctgtgccctctgcctggaacaccctcccctcagatgtcagcaaacatcattctcttattcctgttggtcttactgaaatgtcacctcttctgtgaggcctgtcttgattctgtagctaaaacagcccctccctgccaccaaccaattcctctagcttttttcttttctttttttttttttttttgagatggagtcttactctatcacccaggctggactgcagtggcgcaatctcggctcactacaacctccgcttcccccgttcaagcaattctcctgcctcagcctaccgagtagctgggattacaggcgcccaccaccatacccagctaatttttgtatttttagtagagacagggtttcaccatgttggccaggctggtttcaaactcctgacctcaagtgatctgcccacctcggcctcccaaagtgctaaaattgcaggcatgagccactgcgcctggccaactttatttttcttaaaggcatggcatacagtcaatccttaacacatatttaatctattggctttatggcttttgttttttgggtgtttcttgtttttgttttttgaggcagggtctcactctgtcacccaggctggagtgcagtgacgcaatctcagctcactgcagccttgaactcctcagctcaagtgatcctcccacctcagcctcctgagtagctgggactataggcttgtaccaccacacccggctaatttttgtatttttatttattattattattatgaaaccaagtctcactttgtctccagactggcgtgcagtggcgtgatctcactgcaacctctgcctccctggttcaagcgattcccctgcctcagcctcccgagtagctgggactataggtgcatgccacca[138 bp omitted]agccttttgtatttttagtagagatgagatttcaccatgttggccaggctggtctcgaactcctgacctcaggcgatctgcccgtcttggcctcctaaagtgctgggattataggctgagccactgcgcccggcccctatttgttcattgtccttctgatgcattccacgagggaagggtttttccctctgtcttctccgtcactctgttcccaacacctgaccctgtgaggatcagggcctggtatataggaggtgctcaataagtatccagtgatggagctctaggcccccagcagggtcctgggcccagaaaggacacgacggttgttttctgaacacacagaagctttccttggggtctgaaggaaaattttagacctgaaaccatcccctgggtggaggctgggggtggggatataagtatcttgggagcagccaaggaaagaaaaagaacattcctgtctcatcaaagctgttcaggggagacccgagctccctggctggcggctggggtggagatggcagatgctctctgcag[227 bp omitted]gaggcaggagaatggcgtgaacccgggaggcggagcttgcagtgagccgagatcgtgcgccactgcattccagcctgggagacacagcgagactccgtctcaaaaaaaaaaaaaagaaagaaatacgcatcccacatgacatctcctggttgtgcgtgaggcctgtgtgtgaacgagccctgcaacacatctcataggaaagcaaaagagagagacaaatgggcatgtccgtcaggaggggctgggcatgtagatggcatactacacagccctgaaaaagaatgcatagtacgcagccctgaaaaagacatccctggctgtgtgcgtcctggtactgtcagtgaaagagcatggcagggacagcgggcataggatgtgtgggacgagaaggtgagcacaatatgccaatatttgcaaatgctataataatagcagcagggccaggcatggtggctcacacctgtaccctagtgctttgggaggttgaggcaggaggattgcttgagcccaggagttcgagaccagcctggccaacataatgagaccttacctctacaaaaaaatacaaaaattagccaggcgtggtggcgcatgcctgtagtcccagccacttgagaggccaaggcaggaggactgcttgagcctaggagatggaggcggcagtgagctatgatcacaccactgcacttcagtctgggcgacagagcaagaccctgtctctaaaaaaattaaaaataaaaataaaataatagcaatagtaacaataactgctaatatttataggtcacatactgcgtgccaggcatggttcaaagtcttttacacataatatctcattgaattcgaattgtctccattttacagatgaggcaactgagcatcggagaggtcaagacacttgtccaaggtcacacagcatggcggcagcagaggggggacatgagtccaggctgctgagccccaaaacctggcctaggatttatttatttatttagacagagtctcactctgtcgcccaggctggagtgcagaggcacgatctcggctgactgcaacctccacctcctgggttcaagcgattctcctgcctcagcctcccaagtagctggaataacaggcgcacgccaccaactccagctaatttttttgtatttttagcagagacagggtttcaccatgttggccaggctggtctcaaactcctggcctcaggtgatccgcccgactcagcctcccaaagtgctgggatgacaggcatgagccaccgtgcccggtcctggcctgggatttggtgacaacgctcgctgacagcctacgcctgatccctggtaaaaacagcagacgcctaataagtgccctggagatgctcaagggcaaagtgagcagagacaggggtgtacccaggaggagatggtgagacttaagagagtggtccattgcacagggatgggttggacaatgctctctggggaatccacgcagtcagcacacacgcataggaaaccgggtgctggggagcgaggcggctggctcgtcggaaaacaaatcgctgccagtctcatttcctcctgtgacagagatgggcaggcctggccggggccgacggctggcactgagccagagtcaacggggacctccctacctgtctccgtgtgatgtgtttatcaagaggacgggaaatgtcacgaccatcaagggcaggcggcaggaggggctggtgtgggcgcttcttagatggagtggggagggcctggcccaaggtcaaggtggcccctggagagccttttctccttcctgcctcagcggaaccaacccaccgttcaatccatgcttaagaagaaaccctgcaacgtggttctaagaccacaggtttgctgggcacgcagtggctcacacctgtaatcccagcattttgggagcctgaggcaggcggactgcttgagcccagcagttcaagaccagcctgggcaacacagcaagactctctctctctctccacaaataataataataataataataataataataaataaaagtaaaaaaattagccaggcatggtggcgtgtgtctgtagtcccagctactcagtgggctaaggtggaaggatcgcttgagcccaggaggtcgaggctgcagtgagctacaatcacagccactgcattccagcctgggcaacagagcaagatcctgtctctatcaatcaatcgagaccacagcttcagctgagttcagtgccagtctctgctccttgaacactgtgtgaccttaagcatgtcatttcccttccatgaacctcagtaagatagagtcgtgacctccctgacttggatcaaccttctgagtcatgctgagcagcacgaactttggattcaaagcaacccagagtctgcatcatgatttggcctcctcttagctgtgcagcctcaggtataaatggctcaatctctctggatctgcttatcttgtttgagcccctggatccaactatgcctgaaggtggtccattctaacatcagcctttttggttcaagagccaatcaactccccagcttttcactaatgtcagtttgatgtgggtttctccacctttcttatttatttatttatttaaaaaaaaattttttttttttgaaacagcatttcactatgttgcccaggctggtcttgaactcctaggctcatgtgatcctcctgccttggcctcccaaagtgcctgggattacaggcatgaatcaccacacccagctgtttctccacatttcaagttgtttctccacctttcaagtccactttgtgcctgaggacagagccttgttagtagccagggcagagagctgaagattcgagacatcacaggttatccctgctcaacaggggcttcagatcaggggcttagatcaggggcttcagatgaacctcaaacctctgacccttggatcattcagaacgtggttgctggaaagcaacacccacatggcgtcattcagatttgggactgaggacagttcccaccaactgaatatctaccatgatgcatttagcgagcacctactatgcactaggcccagtgcaggccacaaagtgaaacaactgatgcttcacaaagaccttgtgtgggaagcttttgcccatgctgttccatctgcctagaacacacttccctcccctcactgcccagttaactccttctctaccttcacttcttagatcagccaccgccacctcctccaggaagccttccctgacttttcctcccatcactcacgcccagagcctcccattctctattcccctcccttatcaatctccagcaatttccatattttattgcaaaagtagaaataaaaaaccctgccacttaaa[138 bp omitted]ccttgacctcctggcctcaagcaattctcttgcctcagcctcccgagtagctgtggccacaggtgtacaccatcatacttggctaatttttaaaatttttttcagagatggggtcttgctatgttgccctgcctgatctggaactccaggccccaagcgatcctcccacctcagcctcctgagtagctgggacaataggcaaatgccatcacacctggctagttttttgcagagatggcgtcttgctatgttgccccacctgatctggaactcctggacccaagcaatcctcccatttcagccttctgaggagctcggaacacaggcacacgccatcacacctagctaattttttttttaactttttgcagagatggggtcttgctatgctgccctgcctgatctggaactcctggccccaagcgatcctcccacctcagcctcctgcgtagctgggaccacagctgtacgccattacacctagttaattttttaaaaaatttgcacagatctggggccggggtggggggtggtcctatcttatcctgcctagtctagagctcctggcctcaagcgatccctcccacctcagcctcctcagtagctggggccacaggcacacaccatcacacctggctaatttttaaaattttctgtagagacagggtctt[131 bp omitted]tgaacacttttctttcctgaactacatacgtaaatggaaaatgtaagtcaaataaatggttcatgtttcctgaaaagtcctgtgtcccgagtccagctctcctgaatgcctcttgccccagatttgctgattgggtttttttttctttctttcttttttcttttgagacggagtctcgctctgtcaccgaggctggagtgtggtgctgtgatcttggctcaccgcaacctcggcctcccgggttcaagcaattctcctgcctgagccttccaagtagttgggaccacagactcacgccaccacgcccggctaatttttttatttttagtagagaagagttttcaccatgttggccaggccggtctccaactcctgacctcaactgatccacccgccttggcctcccaaagtgctgggattacaggcatgagccaccgcgcctggcctaattttcgtatttttaatggaggcggggtttcaccaggttggccaggctggtctcgaactcctgagctcaggtgatccacctgcctcagtctcccaaagtgctgggattacaggcatgagccaccacacccggctgtgatttggggttctggcacccggctgtgatttggggttctgcacacatagcactgttgcttgcactcccaggcaccggggacctggcttctcccacgggcggctgccccactgccccgggattttcctcctagccacgctgagacgtctgttctgagggatccacgaaggataccaactatagctggggctcctgctcaccctcccatggcccaaacatcagggtttgtcaactcacactttgagggctggagtggccatggcgggacattaggaagaaccactctacccaaaacaatgcctcatgcatagcaggcactgagaaaatattacttgggtaaacaaataaatagctgagcctggccaggcgcagtggctcatgcctataatctcggcactttgggagggagaggtgggtggattacttgaggtcaagagttcgagaccagcccggccaacatggggaaaccccatctctagtaaaaatacaaaaattagccaggcgtggtggcacgcgcctgtaatcccaactactcgggaggctgaggcaggagaatcacttgaacctgggaggtggaggttgcagtgagtcgagattgtgccactgcaccccagactgggagacagagcaagactgtctcaaaaacaaaaaacacaaaacattgcacaggaaatgagcaatcagagaggttgggcaatggccgcaaaatcacacagctaggaaagaggtgacggcaggatttgaatccaggactaacagaatcctagattttccactggtccaggtggctactgacagcacaaattttcctaaaataggacagggcagggcagggcccaagcaaacatctcaaataagagaacccaaactcacatagatctttaaagtaagagggtggggtgtgtggcccacctagaaattagtaaggggccaggtgcagtggttcatgcctgtaatcccagcactgaggctgagacaggtggatcacctgcactcaggagttcgggaccaccctggccaacatggtgaaaccccgtctccattaaaaatatgaaaattaggccaggcgcagtggctcacgcctgcaatcccagcacgttgggatgcc[134 bp omitted]gaggcaggagagtgacgtgaacctaggaggtggaggttgcagtgagccgagatcacgccactgcactccagcctaggcaacagagcgagactccgtctccaaaaaaaaaaaaaatgaaaattagccaagtgtggtggcgcttgcctgtagtcccagctactctagaggctgaggcaggaaaatcgcttgaacccaggaggcggaggttgcagtgagcaagattgtgccactgcattccagcctgggcaacaaggtgagactgtctcaaaaaaaaaaaaaagaagaagaagaaatgatggaatgatgaccgtgaaatgctgcgagacggaatgaggacaggacagaacaggctgcaccccagctaggtccaacagcaaggcagtctggccatgctgtgtgaccctgggcaggtgactcgactctctaggcctcagtttcctcatctgtaaaatgggtataaaagtctcttcctcccctcacatggctgctgtgaagactgaatcgaaaggcacacagagctgttcacaccacctgagaagcagctgatagactgcagatattatcttggtggtggttgttattatttgtttttattttgaaagacagggtctcgctctgtcacccagactggagtacaatggtgagatcacagctcactgcagcctcaaactcctgggctcaagtgatcctcccgtctcaacctcccaaagtgctgggattacaggcatgagccattgggcccagctgatgttatttttaaaaaagtttttcctggcctaggctgtcagggtgtctagcaccctattccccttgaattgctaagtgagaggcccacactgcaatctcttgatctgtttgtattctccatttaacagacagtgagtccctggagggcaagggcctggcctgccctcccctccatatttgtccctgaaattctgagttctggaaacttctaatggaaggatcgaagagaaagcatcagctcagcctggccactaaccccagacatggaaagaaaaaaaggagggatactctaccttcaaaagccatcccaaggccgggcgcagtggctcacatctgggatcccagcactttgggaagccaaggtgggcagatcacccgaggtcaggagctcgagaccagcctgaccaacatggcaaaacccatcactactaaaaattaaaaaattagccatgcgtggtggtgtgcgcctgtagttccagctacttgggaggctgaggtagaaggatcacttgagcccaggaggtggaggttgcagtgagctaagattgcactgcaccactgcagtccagcctggacgacagagccagaccttgtcttttttttttttttttttttaaaaagctatcccaaatccacttgcttcttctccccaccacccacctttgccttcacctggtccatccctggcatcaaccatgagtatctgagtcaggtcctgtccctcctctgcccacagccctccatagctcccacctctctagggctcaaagcccagggttctccctgcagcccacaagaccctacatgacctattgcctcctctcccctccccatcactcactgggctccagccacacaggcctcctcgctgttcctccaacacgccaggcgtggtcctgccccggggccttggcacacgctgtgccgtctgcctggaatgctcttcccccacgttatctgcttggttcctcctcacctccatcagggctttgctcaaacatcacctcctcaatgaagccgtccctacagccccattaaaaatgacaaccctcatgcctccctcccgagtcccctttgttcctttactgctttctctgatcacccctgacgtgctatatatcgtattttgcctatcatctctctccctgatccacaaagccatcccctttattgcttcagggtcccggcacagagcctggtggacaggaggcatctgagaaatccccccagatgatggaaagcgcaaaatcggaggcagtggctgcggccaaagcagccgctgagaccccggaggctgacggcggaagcctccacgcctactccagccggggccttcctgtccctgttggcaagccaggcccctgccctctgccatccggcggctcaacacctgttgtgacacagcaggaagcaggggcggcagccagtgcccgtggccttggctggacaggtccctccggcaggtttaatccctgccccagtgggagagggggtacacggaccttgaagccaaacacacaggctgacacaagcaccatccacttggcttatccggctcccgggaagtggccagtgtagggacaagcctgataaacatctagcaaataaatggattttttcttttttaattgagacggagttcgctctgtcccccaggctggagtgcagtggtgtgatcttggctcactgcaaactctgcctcaaacgattctcctgcctcagcctcccaagtagctgggattacaggtgcacgccaccatgctgggctctcatttttgtatctttttagtaaagatggggtttcgccatg[137 bp omitted]ccagccctgatttgagggcttcaccctatgaactcactagatcctcccaagggagcctggatggttgaggttatcattatcctcattttccagatgaggaaactgaggcccagagaggtggagtcattgctactaagggacagagccatctggccctagaatctggttttggccactaatcaacacagtctcaacgaatgagaagaataaaacaagggcccggtgctggctcatgcctgtaatcccagcactgtgggaggctgaggcaggaggaccacttcagcccaggagttcgagaccagcctggacaacataacaagaccttgtctctacaaaaaattaaacaacaacaaaaaaattagccaggcatggtggtgtgcacctatagtcccagctgctcagggggctgaggcaggagggtcaactgagcctgggaggttgaggctgcagtgagctatgatcatgccactgtactccagcctgggcaacagagcaagaccctgtctcaacaaagaaaaataaaaagaataaatcaaggtaacagggaaatgtgagtcacgtctacggagcattccgacctggggaaaagggcagctatgcttcatctccctgatgtctcccgacccagtgacatgggcccattttagggatgaggaaaactgagtccctcaagggggaagcgatttcctgaaggatctaccgcctagaagtggcaggctcagagctaatgctaaattcactaaaccctgacccagatcgactacagggtcattttgtagaggcctcagtgctgtaaggagtttggctcgtgcctcgtgagtacccactgtgtgccaggcccagagtggagaagcctcagatgtctcatttccagacaggtaaactgagactgagaagttcagctatttgcccaagccctgagatgtccccattttacaaacaggtaaactgaggctcagagaaagaaccatttatccaagcgccaaaattgtctccatttccagatgggtaaactgaggctgggaagttcagctatttgcccaagccctgagatgtcctcattttacaaacaggtaaaccgaggcttggagaaatagaaccatttatccaagccccaaaactgtcttcatttccacataggtaagctgaggctgagttcagctatttgcccaaaccctgagatgtccccatttcacaaataaactgaggctcagagaaatttaaccatttatccaaaccctgaaattgtccccatttccatttgggtaaactgaggctcagagaggtttcaacagttgccagaggtcacacagccggcaagaggcagcactgagcctcaaatctgaggtttcctgacctgacagggaactgcaggccccacggtccccgcctgagctggcgtgagcctttagcggaagccctccccagctctgcacagcagacaccctcgcggccgtgccttgctggagtatccacagtgacacacagccctgttggtggctgggctttttcaggcttaaaagggaggtaatatcacctaacaccagctatatttttaaaaaccccacagcactcaggaggctggcccgtcagcgcagcaccacgtccgtgggcaggcagaggccccggaactcgaggacgtggctattttaaaggggctatttctggaggctgaggtgagaatgcgggggtgggaggaagaagcagccgcggggaccgactcgagcccgccccgactggccgactcccgggttgggggtggttaaaagcaagaacgtggaagccacctgctccccgcaagcactgcctccagcccgcagaaagacctcaggcggccgggcgcggtgctcatgcctgtcatcccagcactttaggaggctgaggcgggcggatcacctgaggcagggagttcgagaccagcctgaccaacatggtgaaaccctgcctctactaaaaatacaaaattagccgggcatggtggcgcacgcctataatcccagctattcgagaggctgaggcaggagaatcgcttgaacccgggaggtggaggttgcagtgagccaagatcgtaccattgcactcaagcctgggcaacaagagcaaaactccgtctcaaaaaaaaaaaaaaaaaaaaagaagaagaagaagaagaaaaagaaaaaacagacctcatgcatttcagagcctcatttcttcccctgggaagagctgcttaggcaaaatgtatgcctggagccctactgtgtgcagatgctgccatggacatggtagaggaggagagaagcagataatgagtatgaagcattcgaggctgggagaggtggctcacgcctctaatcctggcactttgggaggccgaggagggcagatcatttgaggtcaggagtttgagaccagcctgaccaacatggcaaaaccccatttctactaaaaatacagaaaaattagctgggcatggtggcacatgcctgtaatcccagctactcaggaggctgaggcaggagaattgcttcaatccgggaggcagaggttgcatgaaccaagatcacaccactgcactcccgcctgggtgacagagtgaaactccgtctcaaaaaaacaaacaaaaaagcattcaacagagaaatggtggcaagggctttgagtcaaagagagcagaagggggaagacaggaaactaggtggtggggcaggctgcaagtttaaatagggtgatcggggaggcctcatttaaaagtgacctgagacgtgaaggaagtcagggaggttgctgtttggggaaaagcattccaggcagagggcacagactgtgcaaaggccctggggcgggaccatgcctggtgtattggaggaacagcgaggaggcccgtgtggctggaacagagtgaggacggggagagaggaaggaggggacggcagggaagggatggagcaggttgtgcaaggcctggtgggctacagggaggacttggggttttcccccaagaggtgagagccatagagggctataggcagaggagggatgggacctgactcaagaactgaaagatgtcattgtgggaagacagactgtgggaatgagggctggggtcacaccagagcagaggtgaccgtgttggtccaggtgatgatgggagctggaccaggtggaggcagaggatagaacaaaaatgaaaaaatgaaggccacgtgcagtggctcatgcctgtaataccagcactttgggaggccaaggtgggtggaatgcttaagctcagaagttcaaaaccagcctggccaacatggtgaaaccccatctctacaaaaaatacaaaaatcagccagcatggtggcacgtgcctgtcattccagctactcgggaggctgaggcaggagaatcgcttgaacctgagacagaggctgtggtgagccaagattatgccactgcactccagcctgggagacagagcgaaaccctgcctcaaaaaaaaaaaaaaaaaaaaaaaaagaaagaaaaaaagggaaagcaagctggcctgtgtacagtactcagcgcacagtccggcacacagcaagtgctcagcatacattggcttgtattatttttagggtcttaggctctgtactctgaacctgaaacccgcttcccctggcaggacccaggagaagacagtgacccctgtgcctgggagcattttgtgtatggaaggggacacagttttcactctcatgtccctattggcctgtcccaggctggcggcagctgatcagaccagggccagatctgatggttgcaatggaggaggagaggagaaggaggtagtgacccatgggttaaaggggggaggcccccaggtgtgtcaggatgcagccctgccacaaagcgtggggtcagcccaatcctaactcaactctacttgctgtgtgaccctgcacaagtcacatcccctctctgagcctcggtttccttatctgcgaaagtggggcagtggttgcaggcttctcacagggctgtgcagattcaacaggaccacgaggcactcagctagaggtgggatccgtgtcagcacccatcatgcttggtcgttcaccatcatccccatcctcacactgtttgcaaaacttcgagtctggggtctctggagcacaggggcaagaagagccacatccccaggagagccacatccccagaaggtgtcccaaggttcatgttctgccaccgtttggatccagttgaattgcaaatgccagaaaaagcacaaataaggaatgatttctcttttcacctaagggaagctgccaggttggccattcagggttattttcccctccccgacaatcactggggcccaggccccttccacctctttgatcccccattcttatctatgacacctgcctcatggtccaaaatggctgcctgagcacctgccatcatctccatattccagctgacaggtagagaggagcatgtgccacttctcttgaaaggcatttccagaaaatcctgcttatttacgccatgggtcagcattgaatcatatggcacagacagctgcaaggtgcactgagaaatgttttctttcccccaggtggccatgtgcccagataaaaattgtaaagttcaactgctacggagtcgggggatatgatgggatattgggagatcccgccacaatatctcatgtgggccatggggccaggtcttgggtctcaaaccagcgcatctgagacattttaacctggaaagagaagagagacgtcatcggggccggccccctgcctccacaccacgacggtttcactcattccaacatccacctcccaaaagactccaaggtcagaagcagtggccacgacccaagcacaggctctgcccaaggcgtccccaaggacaggcccccaccggcaatctgtgctccccaagcactggggctgagccaccaagcacccccattcagcctccttcctgcctgccgaggacaccggccaattcatctccttctcctcagtaaacaactgtcagggaaaataaatagtttttaataggctcattaattgaattcaggaagaaatcaccttctccccaggccatggggaagcaacgctcagttcaagaaattcaggccgaaggcagaaggggctcagcctcccagaaagtccaggagatgccccaaacagttgtagtcacattcaataacactgggacaggcatggtggctcatgcctgtaatcccagcacctggggaggctggggcaggcagatcacttgaggtcaggagttcgaaaccagcctggccaacatggtgaaacgctgtcactaccaaaaatacaaaaattagccgtatgtggtgacacacgcctgtaatcccagcatctcgggaggctgaggcaggagaatcgcttgaacccgggaggtgggggttgcagtgagccgagatcgggccattgcactccagcctgggcgacagagtgagactccatctcaagaaaacaaaacaaaatactgactcaaccagcaagggggtcattctgtgctgggcttaaggctaaaagcctcaggtgggtgctaggatgtcttaaacacctcaggggtgctcaggcttcagctttcagcctggaacagacagaggcaaaagcagcaagaatttaatgcccttgttttgctctcaccacatttatttttaaggttgtaccttcaaggacataccaggtttccgttcacaagagcaagacaaagttttctcttttacgttttaaaagagaatgggtttaaacaaaacgtgtcaagtactggctgggcacggtggctcgtgcctgtaatcccagcgctttgcgaggctgaggcgggaggatcgcctgagcccaggagcttggggctgcagtgagctatgatcgtgccactgcactccagcctgggtgacagagtgagatgctgtcaaaagaaaaagaaagaaaaaaaaaagaaacgaagaaaagaaaggaagagaagagaaagagaaaatgagggagaaggaaggagaaagaagggaagagaaggaaggaaggagggagggagggagggaggatagaagtaaagaaagaacaagagagaaagaaagaaaaaggaaggaaggaaggaaagaaggaatgaagcaagcaagctagctagtccttaggcgatggggcagcaaaacaccagatatagagtccaaagaccctgcagagtgacctcggcacagacctagagagtcacaactgaccctccacacctgctgagggttctgtccacattgacgtgactcagtttccccactgaggctgaggtggtccaagggtagccccgctcgcactcccagcccagctcctgccagcgtggcagcctgccctgcgactcggtctgcgcagggcttgccgtaggtgcccgccaatctgctctccgcactgcagtgggcacactccaagcgcaactcaataccccggacacagcgactccccagcgcccccaagccccatatgcaggtcctgcgaccttgcttccagagggcactgatcatcaagctgtattttatgatatcttagccagtttggggcttactccaagcgtgtttagcatagatccttccaataccaagacccttctacccaagagacagcctcacccccattttgcagacgagaaaactgaggccctggagggtgaaaccactgccccagggtcacactgaacaagcagctcagacatgattcaaacttgcaccattcaaatgctaaacccgatcccccaaagatcccctggcccattcctggtgagctcctcagtaacttctccacctgtctggccagacacacagggtgcccaacatccatcaggcctggctcagttctttttgtttttagagacagggtctcgctctgttacccagagtgcaatggggcatgatcatagctcactgcagcctcaaactcctgggctcaagcaatcctcccacctcagcctcctgagtagctgggattacaggtgcacaccaccacacccggctaatttttttactttttatagagatggggtcttcctatgttgcccaggttggactcgatctcctagcctcaagcaatcctcccatctcagcctcccaaagtattgggattacagccatgagtcaccatgcccgggtactggttgactcttaaaatcatctggcccaaccactgtacactttctgggggtccccagaccctttgggcctctcaccttctcctcaggagacaagaaatctcacagactgttttagagttccctgacctcctgacactggtcctcagacccctggcttgaagccaattactcagagacatcaccctcaaagccattccttaccacttcttttgtttttttttgtttttgttttgagacagagtctcactctattgcccaggctggagtgcaatggcacaatcttggctcactgcaacctctgcctcccgggttcaagcgattctcctgacttaacctcctgagtagctgggattactggcacacaccaccacggccagctgtatttttagtagagactgggtttcaccatgttggccaggttggtctcaaactcctgacctcaggtgatccaccagtctcggcctcccaaagcgctgggattacaggcgtgcaccaccacagctggctgtatttttagtagaaaaggggtttcaccatgttgctcaggctggtctcgaactcctgacctcaggtgatccacctgcctcagcctcccaaagtgttgggattataggcgtgaaccaccgcgcccggcccttaccacttcttgccagacactacggatattcatcagctcagagagggtgagcaagtagctgagagcacacagcatttccgctgggaacccagtctcctggcctccctgcccaagggcagagtgagctgagctttaatcccagcactttgggaggctgagacaggtggatcacctgaggacaggagttcaagaccagcctggccaacatggtgaaacccagtctctactaaaaatacagccagccatggtggtgcgtgccagtaatcccagctactcaggaggttgaggtcactgtggctgcctctccctgcaacatcacccactccgagtactctcagagcaggaccagggggctcttgctgtgagctgccgaggcagggctttccccatcattacctgcctgatcaaggtcattagacgtggcaatgctggtacacgcaggccaggcggtagctcccaggagccagacgggctgatctggaggggcgggtgaggtgtggcggagcttaggtcctaaaggggttgcagacagagcgatatcgtgagggaaaacaaaacggggtgcgggaggcaatggcggggtaggggtggcctggccagaaacagagctcccggcagagcaaggacaaaggcctggaggtggaaacaggagaaggataggtctacatggagtggaacggacaaaggggaggggaagaggaggagagatgaggccagcggcccacagagaggagtctgagggtgccatccagagagggaaagtgacttccccgaagtcacacagctcgtaaggggcaaaaacacatcctggccgataacatctttgctcccagccactgtgggaagtggcctctggctacatcgtagctaacaatccagctacagaattgcagcccccagtgcaaaatgaaaccgtggggttttccttgtttaaaaattattaaggccgggcacagtggctcacgcctggaatcctagcactttgggaggctgaggcgggcagatcacgaggtcaggagatcaagaccatcctggctaacacagtgaaactctgtctctactaaaaatacaaaaaattagccgggtgtaatagtgggcgcctgtagtcccagctattggggaagctgaggcaggagaatggcgtgaacccgggaggtggagctggcagtgagctgagatcatgccactgcactccagcctgggcaacagagcaacactccatctcctaaaaaaaaaaaaaaattaagaatttccaggtcgggcatggtggctcacgcctgggatcccagcactttgagaggccgaggtgtgtggatcacctgatctcaggagttcaacaccagtctggccaacatgctgaaactctgtctctaccaaaaatacaaaaactagccgccgagcatggtggcacatgcctataatcccagctacctggaaggctgaggcagaatctcttgaccccaggaggtggaagt[132 bp omitted]cccttctgatcgtgggcccccgagtgactgcagggcccccgtgaagctgggcctgggtgcagcctccaggagtgtagaaacgacatcctgtccagaaacaacgcctctgtaaacctgagaaagggcttgtcattcccagttctcacccttcctttgtgcctcagtttccccatccgcaagacaaggggacacctgccacctctcagggcagttctgaggaggaaatgagaaaacacagggccaggcacactggtactggtggcggagcattagcggcccccaccacgggggactttccgcccgcttgggttagttctcctctgttgcagctgtttggagaatgtgggtttgaggttccaacctcatcacccctaacggttcacgaagctgtggggagagagggtagactcatccagctcctcctgtgcaccttgggctcctggccccgttatcaatgtgacaccactgaattcccagtgatgcagcaggcaagactcgtccccatttcacagatgagaaaactgaggctcaggggaaggaaataatgaggtcatctcacacagccagggagggtctttgtcaggatccgaacctggggcgttcagacccctaatgcccttccccagcagggccggagtctgggctcccagggccagatggggccaagagaaaaagtcctgggacctggcagcctctctgcaccctgctgatatctgggagttgaagccagcactgttgccggaaaccccggcagttcacactctctagaattcatccgacaggggcaattacccacttccaataatcaatggggcagtggaaccaggacagatgtgcagagggaacccattagcaatctaagcgttctggccccgcgagacgtcagggagcgtgttgggtggacgctcagggacaaaggcaccatctgcctgatttctctcgctgtcttgggtcttcagcataagtcagggcttctttttttaaaaaaaaaaaaaaaaaaaaaagagaaggccttgctctgttgcccaggctggagtggagtgatgcaatcatagctcactgcagcctcaaactcttaggctcaagcaatcctcccacctcagcctccccagtagctgggaccgtacgtgtgcaccccaaccctcggctgatttttttttgttttttgtagagatgaggtctcactgtgttgcccagtctgatcttgaactcctaggctcaagcaatcctcccgctttaacctcccaaagtgttgggattatggacgtgagccaccatgcctggcaaaatcagggtttctaaacctcagcacagtgtacatgagggtggggtcattatctgggatggggtcatcctggccattacacagagttgagcagcatctctggcttccacctactccataccagcagcacccccctggacatgacacccaaaaatgtccccagacgttgccaagtgtgcccaggggagcaaaagtgaccccggctgagaaccacagcagtacactcaacgagtaatactggtaacccgggtgctccagccccaagagcaaacgactgcgctacagaaagaacgagggatggagaagcaggtcctgccgccagtagataattcgcagccctgccccgcgggacagccggcttccttctacgcagtatttaatttaagtcaagtttatcattatgaccaatattaatataatcagagccaacgtttatcgagcgcggacgctggcccaggccctgttctcagcactctctgtaagctatcacactggtgcctctaaagaaccgcagaggtggctgggagtcttaaacccatttcacaggcctggaaactgaggcccgcggacggcaatggaggtgtcagaagtcacgcaacttttaattgttggggaaggggtcaaagtccacggtggccctggatttctgtactgtgccatgttaagatgtttcaacccaaggatgttaaaatagggcaatttttttttttttttagacagagtctcactctatcgcccaggctggagtgcaagtggcatgatctcagctcactgcaacctccgcctcccaggttcaagcgattctcctgtctcagcctcccaagtagctgcgattacaggtatgcaccaccatgcccagattatttttgtatttttagtagaggcggggtttcaccatgtt[133 bp omitted]tttccttggaaaaaccaacagatctggccctggagccattcagggcttccttggaggttgaagaagcctttttggcccatacgacccgctggagtggagactccagccctgacaggcgttatggcttgagaatcacacacccgccatggcttcctgcctcggtttctccctttggactggtgaaaggggtccctgtccatcctcctgcgcaaggcccagcagcaggcaggcaggcatggctgtgtggtcttgggcaagttgctctccctctctgggccttggcctgacagatgttccaagaagcattcccaacattccaggttttctgttgatcctgatgttggcagcccagctctgggggctttcagagaactctgaccgcacatctaaaaaatgcaatttgttagacgcggtggctcacgcctgtaatcccggcactttgggaggccaaggcaggcggatcacttgatgtcaggagtttgagaccagcctggccaatggggtaaaaccccatctctaccaaaaatacagaaattagccagatgtggtggcgggtgcctgtaatcccagctactcgggaggctgaggcaggagaaccacttgaacccgggaggcggagattgcagtgagctgagatcacgccgttgcactccagcctggcgacagagcaagactgtctcaaataaataaaataaaataaaaaataaataaaaaatgccaattcgccaggtgtggtggctcacacctggaatcccagcattttccgaggccaaggcaggcagatagcttgaacccaggagtttgagaccagcctgagcaatatggtgaaacccatctctacaaaaaaaaaataaataaataataataataataataataataatacaaaagtcagctgggcgtgctggtggatgcctatagtccccagctacttgggaggctgaggtgggaggattgcttgagcccaggagttaagacactgcagtgagccattatggcatcactgcactccagcctgagcaacagtgtgagtcctgtcacacacacacacacacacacacaatgcgattcgaactccttggggtggggggtcctgtgtggtcttccccagctaaagtcaactcttctcttcttgtttccgcccccctcacctccagccacaaagcagcaggtgccactctcagtctctgtccttggtgccccccacaccagttcatctgtctccacttatgatagaggcaatgtcaaagcacccattttacagatcaggaaactgaggcacagaacagctttattactagcccaagccccacagctgcttagattctggcttccaagttccttagcagcaggtttccagcaatcctgatggaatgaatgaattaatgaactggtgaatattcgaatgaatgcatgcatgctcgctcgcacaccatgcttgtcaaccgatcactttcctgagtgcccatcaaatgactgctgttaaacccccaaatcccccccaaactcccccctttggtgatcactcgggcccaccaggggctctggaagttgggagccacatgtggagtccctggagtgcctggagctcccaaggcagccacgtgtcctccctgtccaccatccaggccccctgtggttcagctcccgccagtcgcccagtcctgccgcagaagtggggcggccttgattaagcagccagtgaaggggaacgccccagtttgcagtggctgagtcatcctgacatctccctggtgctggaccccatcggggggctgagggcggggtagcggggcgcgggtggacactggagagcccctcttgggcaggtccttcaacatatcagtgtagctcccatgttgtcaaaaataataacaaaaacagaatagaggtggcagctacattctaggtgccgttctgaatctgtgcttacacacgttaactcatttcttcctcctaacaatccctcaaggtgggcactgttactcttctccatagacagatgaggaagacggaagcacagagaggttgagcaacttgccccaggtcacacagccaacaagtcggcagagccgggatttgaaccccatgcagcctcagtccagcatccttgctcttaacctctgagaaaaggcagtcaagagccctggggtgtgtgtgtgcggggggtgtctctgtagcgattcaggtggcccccgcagcagatggactgctgtccaaacaaacatccctgacaatcgggcagagctccttccaggcgttaggaatccaggttgtggcagccaacagcttgtgggctgtgtgaagtgacctcaggccagtgaaggcccctccctgtgcctcagtttccctctctgcaaaatagggctcagatcacagcaactccgctgacaggggacggcaggttggaggagacaaggatgctactgacttgcttacttagcagagggcctggcacggggcgccaactctaaatagtcggagcagctgttattatccccccgacatcccctcatttgctgatcacgggggttaattataagcggcattaaattatacacacacagacgcgccaacctcgcttccccagaacccctgaatttccgcaaactctcaattacccacgtgacagcgcgacgatgggccatcctcccagcctctctccccacagcctgcctcatccgagggtcccaggcttccagagccatggcttctccgcccgccggatacccctctgggtgtccaggagcggaaggaaggatgcatgcgactgactgcggacgcgttgagagccaggggaggcatgtttacccacagcatctcatgtcaaggctcgccgcgacgcagactgcgactgtactgatcttagagatgagagaacacagagaggtcaggcaacccgccctagtttgcacagctcaagtgaggagggtggctcaagtcagggctctgacctggaacccagaggggtaacctcattctgtaagtgaggaagctcctgcacggagaactgaaagggaagaggggaagtcatccaggaaggaaggaaggcaggcaggcaggtgagatctgggagaaaaaggggaattttcagttctccaggtagggggaacaggagacagctggcccttcctataaggggcttatggcaaagatcaaaaacaacttaaaaggagcaaggccacccagataacataaagagtacgagatgaaatctgtccccatgaaacgggacatttgtgatccagccccagttacggcgatggggaccggaggagggagtccccatgatccaaaaatccaggctctgaacccccaaccagggtgggatccgcgggaatcagaaggaaacaggaagccgcacagaaacctgggtttattttcagatgtggaatatcccctcggcctctgcggggcgcagagggtgccttgattccggggaacagaagaggggattccacggctagcccagaatagcaccagccccaaggtccagtctggccaggccacgatgttgggggaccggcagctccatggaggaggaggaggaggaaaaaaaaaaaagagagagacaaaaataaagcgatgtgaaagtggagggcctgtccgtgaatcactcctacccgttaattttcgcctttggagaagtgtaagccaattgatttttcaaattccccacacacaaccccctccccagcgcttctcaaatatcagccagagacaagacagaaatggtacgtcgggtttttttttttcttccctttttggttgagagtcttttctttccttaaaggaaaaggggggggggcgggggggaaaccacacactccacactcttgaacctcagggttagagagacccaggtgtcacctgtttcctagacattttggggctgccactctctgcgtgagacaacagccaccctttccctcgatcacatcccctacacttcacttcctctctccgtgtcccccttcctcaattcagaatgtcacctggtgataagatgacatgcatttgagcctcaatccccttccagcatcccctctcctctgccccgcaagccacaagctggcagctttccgattccagagcaaggtaaggtgtgaaaatgacaaaattcacagtttaaaaagcccttgaaaccttcaagccccggatacgtgccttggtccgtgaatccatggtgaatttttggtttttttgttttgttttgtatcagcttgccacacgaatcctgcgaggaacagcagttatgtcttaatctcctctcctcctgtccccaccggaggctgagccactctgcctggtgagcggttggagggtggggcggcggcgggtggtgggggggagggtctctcttcaaattcccctccctgggcatcttttgccgcagggaaggacggaggaagggcaacctgcacaggctttgcccgagaagggttctcatcctccttgcaaattctaagaggacacccacccattggaaggtgagccaggagcctaccctggatgcagaggagagctggggagtgcccctttctgggacccctgtctccttccagaaagtacgagaccctcccagaagggggctacagcggtcagcactgcgcccgccaaacctaaagctcatctcaagatcttcccgtggctccgaccgactctgcaaatggagcttaatgggtagcagggggaaggaattgctctcagccgaaaaacattaagctttgtcaattatcccccaaacccgctgggtttataaatatccctttttatttttagggttttccctcccgctcgcccccatcccgaactctctccacgccccgcttcttcccccacgcacacggcggctgcaccgtcacagaaagcaggtgaacgcggggccacggggcgctcgggtagaaatgccacgtcgcaccaccaagtcacaccgtccctgcccgtccctctccggccatcccactaactattgtattggggccatgcagccgctggaataatcagcgaagccacaggtctccccatcttggcaagtggaggtgtgcgctgccctcagacatctgtgaaccgctgttcaacgccaaccccgaaggcagaaggggaaaccaagtcacctcccagaaagacgtttgatgagcagagatagatttgcctccagactggtaccaggtctggggaaacccaggcagagccccaggctctatgcgacccaaagaagaaaaaaatgggtgcacagtgatggctccaggtctccccacccagatgctaccacgaaatccctggcatccacgaagcttccccctgttccatggtggaaattgggggaaaatggacttgtgtctccaagcagggtccatggacactggacgatgcctgaaatcccctgggaggcagggaaaaaaggcgcactgaacgctcaaccggggtataaggagtgatttttttttctctgctggcagcaggcaggaacctggggtttgaatgtccccttctctgtcgccacctcacgcagacttcagaggctctcaaggtttcctggagagggggaaatcgtccccggagctgacctgccaaccagtagcaccctccagcgcctcagccgggccacgccaaaatgacctgtcacccatctcccgcggggagtggggagcgggccagtccaccgcctcttgggacggcatctctggacggccactgacagtaccagtctctgtcaccccctggggggttaggggcaatgtcatcggccagggtggcagaaatagaaaagtgcgtgagctcaccaggcagcctgggtctcctgcgacgttttgtttgcctgagcccaattagaacaactctcaggatgatggagtatggcgggcggtggcccccagggggctgggaggcctagcccccatgcagaagtgcaccgtcatgatgagggtgtcccccgggcctggggaacagggcaggaccctgcttcccggagggaaataatgaagactccgccagcctgccagccagaaagagatgccccacggaaggctttgtggagggcagcgggggggtaggggagggatgcccaggtggggactcagtcaggcccaagctggggggctgtgggatttgagggcgggaagcagccgcccccagccccagctgcctgccttccaccgccaaaatatcagctggcaaagaaagaagagcagagggacagaaggcaggcgcgattggcagggggaggggggcacaaaggaagggaccctgggagggggaggggacttatgcaaatggcagattcgaccaagtccctgggccattaataaacgctccagcagctgccgctggtatcgcaggagcagaggagcgggatggcttccttctcccgggcgaaaggcggcagaaagagggaagaagggcgccccagacaaagaggcgccgtcaccctctgcaccccaaggacagcagcgatagggggccacccagaggaggccagaatcccagcagccaaagtccgggtggtggcggacgggagcccggagcgtgtgggtccctgtccttgggaccctaggggtctcttcctgcctcctccggcttctaggtatcatccctgctgctcagccgggactccgacacctcggacacccgcttcactagccgcggctgccgggatgtgtttttagggtctcggccagaggcaggaggaccccatgctcagaagggggctcccctagattgtgacggggggggacaggggaatcccagctgagcccagaagggggaggcaaggcacccccaatgaggctctgggaggtttgttaatttgggggaatgaggtcccaggaggtggctggatttgaggaagggttgcagaggaaggggcgttcttggaagctgcatatttagggagacgagaagacgatttgagactggggaaagagggtcaaccgaagaaggaggtcccagatttggggcggggggtgtggctgaaaaaaagattcccagtttgtgggaaaggttccctgatttgaggattctggagagaaagcggccgaaggggagttccccaatttgggaagggggggaattggtgggaaatgtccaggatttgtagggggaggtccgaaggggaggatcttaattttaggagagattcccataaagagaggtgaacttggccgcaacctggccgaaccctcgcacccacggcgcgggcactctaacctggggggctcccctcagggcacgccccgcgccccctttaacccagtgccgacggccccgcccccggtatgacgtcacctcccctccccccgcagcccccgggggctcccggggcgtgcggaacccgcggggctggcggttccaggggcggcttccccactctcgggatccccacggggcccccagcgcggaggggagactggggtgctgggcgtgcgcgtctgcctgccagagcccctggggctgggggctgaggctcgcccctgggtggggaggctggaagggggcgccgaggccgcagaagggtggggcaatgcccgagtgccggaggggcgacctcccataaggcaacgacagggcccggagtgttccaggggagacggcgtagactagggggtctccaggggagggagacccggagagggaaggcggcgggcgcagcagccctggagccaccccgcctggagccacccgtcccggctcctctccgctccggggcgcccgcatgccccccatcccccggcacagcgccccctgcctccaggacccgcccggggacccgggccgggcgccgccggggccggcaccggctccgcacacacgcgcgcccccctccgcgcctctgccccgcccgcagcccggggtggtgcagccggcggcgctgggcagcttccaatgccgcgctctgggcgcttccagcccagccccctcccacgccgcggacgaagcccccccagcaccccctgccgagcgcccccagcgcggccccggccctgtccctcggggcattgtccgggcgcagctaccggggcgcagcggctgggcgtgcaactggctgcagccgagcatcctccgagcacaatggccgtgcaggcttccccggcacaaagccggcgcgctgcccactcggctgcctccgagaccccccttggagcgcctgcatttttttttcctctaatccatgattttatttttttttttggctttacctggaggctggctgggctgggctcccccggctctgccccgcttcacatcgtggctgttgcatgggatccgagcggagcccgagcgccagcggctcgcggcgtgcgcgcgccggccgggctgccgggcgggcggcgcgaggacactcactgcggctcgcgctcccctagctcccgctcgcgcgcccccccagccggtgacgtcatcccttccgccagcgccgccgccgccgccgccgggtcgggggcagggccggcccgtgcgcgtcactgcgcagccgcgcggccgccacgccccccggccaatgggacggcgcagcgcggtcacgtggctccggggtgtttaaagggccgcgggagcacgtggggcgcggggcttcgcgggacacgtgggcggctggggtggtggtggtggtggcggctgcggcggcggcgggaagggcccctggggctactgtccgtgcgggagccccagcgtcctgggtgcaaagggcatggcactttctgtgcgctgccctaaactgtgccacggctccccagtacccttggaataaaatcccgcctcctctctgcagctcgccgtttcacattagcgcccactaccctgtcccctcccccccaccatgtcaatgatccagaaaaaccagctgctccttctttgctttttcagagatggggtctgccacctgggcctcagtacagtggtatgatcatagctcactgcagcttcaaactcctgggctcaggtgatcctcccgcctcagcctcctgagtagttgggctcgggtgatcctcccgcctcagccagcttcttacagttcctctaacttgagcatccaagaacttccccttctcatctttccaatttctgctcaaataagcagcgcctgggagaagccctccctgacaacagctaccagccacgccccactccactctatcccattatcccggtttgttgttgttgttgttgtttgtttggttttgagtcggagtctcactctgtcgcccaggctggaatgcagtggcgtgatcgcggctcactgtaacctccgcctcctggattcaagctattctcctgtctcagcctccggagtagctggaattacaggcgtgctgtcaccacgcctggctaatttttgtatttttgttagagacagtgtttc[144 bp omitted]cagagatccctattgtaggttgaacacatgaatgaatggatgatggagcacttcttatagagtaagcactttacacaggtctcacctaattaccatcccctgcttccctggagtcaggacgagccacagttggaacccagctaaaacactgatttgctgtgtgaggcccggagcctcactttccccatctgtagaatggatttgcctctggatctcagctctcatctgtaaaatggggcaaggtagcccctgctcctaaggagggtgtgatgatgaattgctataatgtggcagcctggctgccattggtgcctgaagatggaataataagagaaaagaggccgggcccggtgactcatgcctgtaatcccagcactttgggaagccaaggtgggcagatcacttgtcaggagttcgagaccaggctggccgacatggcgaaaccccatctctactaaaaatacaaaaattagccgagcgtggtggcaggtgcctgtagtctcagctagttgggaggctgaggcaggagaaactcttgaacccgggaggcggaggttgcagtgaaccaatatcacaccactgcacactctagcctgggcgacagagtgagactctcaaaaataaggaaaaaaaacagagcggaagtaaataaaagggggatattgacaaaggtaagggggttggagggctcacagccaccaagcaagattgcacatcagtccttgtgttttgatcatgtcgaaagcatttatttcctcaaggcacatatttggagaaggcctggtgcccaacagaggaactcaactttagaattggttttttttttcctccaaaattgttgattcattcattccaggccacagatgcagataaacaaaaagcattaacccggggaacaaaacgataaggcggaagtcataaacaggagaaaagagaggagataatgaataatttaacaaggaacctaatttaagcttggagtttcccagcggccagtgcagcagccacgtttgcagagcctactttgtttttcttcctggtggggtgaccctgatctgaccgtttacaatctggcctcagttttctcatccaagcaatgggaacacgatcccatcttgaaggatcaaatggggtggtctgtgcacaaatgcttagcgtggtttctcacgcacagtgggtgctgaagccttggagaattggtggagacacagtaaaatgagatggctgatcgtggaggggctgatcatggcacgaaccccagcccagtgacctgtttgggaggtgacctcaaacaagtggccgcaacactgtaagcctagctgtccccatctagaaaagggggacaaccactagtacctctgagggattttgtgagcagtcaaagaaaacagattaaatacatcaaaaacagaattaaaatacattgtagcagctgggcgcggtggctcatgccagtaatcccagcactttgagaggccagggcgggtggatcacctgaggtcaggagttcgagaccagcctggccaacatggcaaaaccctgtctctgctaaaaatacaaaaattagccaggtgtgatggtgcatgcctgtagtcccagctactcatgaggctgaggcaggagaattgcttgaacctgggaggcagaggttgcagtgagctgagatcacaccactgc[144 bp omitted]taacatggtgaaaccccatctctactaaaaatacagaaattagctgggcgtggtggcgcgtgcctgtagtcccagttactcagaaggcaggagaatcgcttctacccgggaggcagatgttgtaagtgagctgagcgccactgcactccagcctggcaacagagtgagactttgtctcaaaaaaaaaaaaaaatacattccagcatgtgcttgggaaacccatctgttcaggccatgcatccggccccgctcccaggttgtttgaagtgctgtggacaacagaagtaaacaaaacagtctttaaaatccctggagttggccaggcactttggcccagcactttaggaggctgaggcgggaggatggcttgagcccaggtatttgggactagcctgggcaacatagggagaccccgtctttacaaaaagttttagaagttagctgggcatggtggtacacatctgtgatcccagctacctgggaggttgaggtaggaggatcgcttggatgtgagagtttgaggctgcagtgaactctaagcacgccactgcactccagcctgggcaacagagcaaaaattcctggagtcaacagtgctgggaggagataggaaatatcttatttagagtaaaagcttaagctcttcccacagctcaccaagctctgcataacctacccccttccccgccctctgtcaccctcgctcactctgctcccgccactcgggcctccttgctgtgcctccaacacaccaggtaaggtcctgccacagagcctttgcactgtctgttccctctgaccaggatgctgttcctcctgcttttctcaaggccaattgttcctccttgctcttcgagtctctgggagaccctcccagaccatctcactgaggtgaccacatgatcatctttacttcagtatcagattatttatcatgatttggaatgattttatattttggccggtttgtgtgtttcctgcgtgtctccctactctagctgtgcctcagtttgcctgtctgtaaa[131 bp omitted]cccatctctactaaaaatacaaaaaattagcgggcgaggtggcaggtgcctgtagtcccagctactcgggaggctgaggcaggagaatggcgtgaacccgggaggtggagcttgcagtgaactgagatcacaccactgcactcctgcctgggcgacagagcaagagtccgtctcaaaaaaataaaaaataaaaaataaataatattggtcccttagggctgtctggagggtgaaatgaatcacactatgtcaaccacctgccaccaggtgcagactcacaaaaggatttctggtaagtgtggtcactgtaggctgggcgcggtggcccacgtctgtcatcctagcactttgggaggccgaggtgggcagatcacctgaggccaggacttcgagaccagcctggccaacatggcgaaaccctgtgtctactaaaaatacaaaaaaattagccaggcgtggtggcgggtgcctataatcccagctacttgggaggctggggcagaagaatcgcttgaaactggtgggcagaggttgcagtaagccgagatcgcgccattgcactccagcctgggcaataagaaacaaagtccgtctaaagaaaaaaaaaaaaatgcggtcactgtaaatgagaaaactatggttgcctagccagaaacaaaagatgatcctacaagtcgatacaacaagaacagaaaattataaaattcttttttttttttttccaagacagggcctcactctgttacccaggctggagtgcaatggcacaatcacagctcactgcagtctcaacctcttggggctcaagtgatcctcccagctcagctacccaggtagctgggacgaaaggcacagaccactacacctggctaatttttaaattttttgtagagacaggctctccctgtgttacccagcctggtctcgaactcctgggcttaaatgaccctcccacctccccctcccaaagtgctgggattataggtgtgagccactgtgtgcagccaagccaagaacagaacattctagtctgatgctgttgcagcctctggacagctccaggaaattgacacgtgttacaaaggtgttaaagacgcaatagcaccaagctaagccttcctgcaggccaaggcttgaagagaacaaaggagagaatgttgtccccaggggcatgcctcaaccctccaagttccacactgtgaaaaacactcagactgggaggtaggacatggtgggttctgggtctctttcctgtctgctgatcgtggtgagctggcacgcacactgagggtgtgagtcattgttgggtgaaaagttcagtcaatgaacattcgctgcttcttcaggagcgttgtgggggagggggctcttcccactctcccaccctcctcttccttttctgccagaccaacctctgcctaggagcctcccagaacctggtaattagctccattgtggttttgttgagataactccaggggaaccatcagccgcccatcactgtgtacaaacaggacccttcataccaagttcaggattgtctgcaaagaactcagccttaaattcctgccagacaggtccaaaacatctcccctaaactttccctgtgccagagattccactatcgttgcacgttacttcaaattaaatgttgttctctctgctcctctctctgtctctttctcctcacaaattcgcttcaaacgccaaagggaagaggagcagataggaacatcctatttgctgcacacctgctctgtgctgggctccatgtggggttcacttgggggtcccctgatttagctgatttggtaagcgttggaggatttggggaggcatgggttaggaaaacactcaacaactaggcacagaatgaagctttctcaacctagtaaaaggcatctacagtcagtatcatactttatggtgaaagactggatgttttccccgtaagattaggaacaagatgagaatgctccctcccaccacttctattcaacattgtactgaagcctataaccaggcaactaggtgagaaaataacataaaaggcattcatattggaaaggaagaaattaaactatctctatttgcacatgacatcattttgcatgtagaaaatcctaagggatccactaaagacctataaaactagtaaatgaattcatcaaggcggcaagatatgaaatcaatacacaaaaatccattgtatttcctatgcagtggcaatgaacaaacgaaatgaaattaagaaaccaattccatttacaattgatgaaaaagaataaaatacttaggaatatatttccaaaagaagtgcaaagcttatactataaaaaataacaaaaggttgaaagattaaattaaagaagacttaactaaatggaaagacatcccatgctcatggattggaagaataatattgttaagatgtctatactccccaaattgatctaaagattaaacccaatccctatcaaaatttcagttagcttctttgcagaaattggcaagctgatcctaaaattcatgtgaaaatgttcgaggaacttagaacagccaaaacaatcttgaaaaagaacaaagttggaggactcagacttcccaatttcaaaacttattacaacctactgtaaccaggacaatgatgtactggcataagaatagacattcagatcaatggggtagaattgaaagtgcagaaaaaaccctcatatctatggtcaattgatttccatcaagttgtcaattcagtggggaaagaatagtcttttcaacaagtggggccaggacaattccatattcacatgctaaagaatgaagttgaatccccacctcacaccatatacaaaaatcaactcaacatggatgatagacctaaatggaagagcttaaactataaaactcttaggaaaaaatgcagaggaataaatcttaatgatcttgaattaggcaatggattcttttgaggttcctttccaggtgattaaaatattctaaaattaaaatgttaaaaatgttctaaaataaaataaaaatgtttaaaaatgttctaaaatgtggatgattggtgatgatgatgtcccttatacaaaggggaaatttggacacagagacagacccatatagaggggagatgatgtgaagaagagacacagggagaaggcggccgtctgcaagccaaggagcgagacctcggaagtaacacatcctggctgggtgtggtggctcatgcctgtaatcccagccctttgggagaccgaggcgggtggatcacctgaggtaaggagtttgaaaccagcttggccaacatggagaaaccccatctctactaaaaaaaaatacaaaaaattagccaggtgtgggtagtggcaggcacctgtaatcccagctactcaggaggctgaggcaggagaatcgcttgatcctgggaggcggaggtcgcagtgagcggagatcatgttattgcactccagcctgggcagcaacagtgaaactccatctccaaaaaaaaattgtttttgccatgttggccaggctggtcttgaacttctgacctcaggtgatccacccacctgggcctctcaaagtgctgggattataggcatgagccaccacgcctgcccaggattggttacttctgagacctcactccttggcttgcagatgggccgccttctccttgtatctcttcttcacatcatttcccctatatgtgggtctgtctctgtgtccagatttcccctttttataaggacacccatcataaggtggatcatagggtggatcgggacccaccctaatgccctcattttaactttacttctgtgaagaccctatttccaaataaggtcacattctgaggtcctaggggttaggacttcaacatctcttttgggggaacgcagttcaaccccataaaagaccctttccctgacagtggcttcactgatacccctcaaggactttacctactcctggacaaggagcttgacatccccatgacatatgacaagagatgctagaccctagcccataaatcatgagcaccctttgttgattgcaataagatccaggttttgggagaggcaaggggatgccatgcagccagcctcccagctctagggcctggctggcacatgtaaagatcaagggctttattctcccactctccctgggggacgcaatgacaaattcagatcaggcctccgttgtctcctgccagctggcggtgcagacagggcctcttggttcatcccttctcaaggagaaaggcttggattctccaccaggtggggtctgtgctgggtattgtgtgtagagtcagagggacatgcctggcagtgtcatctggacccctgccacaagcctcaccaagccaagggccttccagtgccatcagtgtgggccctgagtgtggtacttgaaactttgagaggctacaacttatttattattgttttttaagacagtctcactctgtcactcaggctggagtgtagttgcatgatcatagctcactgcagcctcaaactcctatactcaaacaatcctcccacctcagtctccaagtagctgggattacaggtgtgcaccagcccacccgtctcatttctgcttttttttttttttttttttttgagatggagtctcgttctgtcaacaggctggagtgcagtggcacgatctcggctcactgcaacctctgcctcccgagttcaagtgattctcctgccttggcctcccaagtagctgggactacaggtgcatgccaccacgcccagctaatttttgtatttttagtagagacgaggtttcaccctgttggccagaacggtgtcaatctcttgacctaatgatccgctcacttcgggctcccaaaatgcatttttgtatttttttgtagcaatgggggtttcaccatgttgcccagattggtctggaactcctgggctcaagcgatcctgacacctcagcctcctgagtcgctgggactatagacatgtgccactatgcccagataatttaaaaaaaaattttttttttttgtaaacatggggtctcattgtgttgcccaggctggtcttgaactcctggtctcaagtggtcctccctcctcagcctcctggagccctgggattatggatgtgagccaccacactggcctcacaaagtgattttaagttctacgcactgagcatgaaacactatggtatggtcgcctgccaaaattactcacgtctaagaacagatgattccccttgagcttgttaatgtccctaggatttgttaatatcatggttgggtctttattgtttttctttgtaacttttttgtcttccttattcatttgacttgttacattgttacttgcgctcgtgttttaattccactgatacttgcatccagcgctggacacatgacctgaagtttctttaaactgggcgcggtggctcacgcctgtaatcccagcaatttgggaggccaaggtgggtggattgcctgaactcaggagttcaagaccagcctggctaacatggtgaaatcccatctctactaaaaatacaaaaattagccgggtgtggtggcacatgcctgtaatcccagctaattgggaggctgaggcaggagaatcacatgaacctgggaggtggaggttgcagtgagctgagatcatgccactgcactccagccttcgacacttcgacagaggagactccatcttaaaaaaaaaaaaaagagagagagagagagaaaagaagaagaaaaagagacatttaggccaggtgtggtggctcatacctataatcccagcactttgggaggccgaggcaggcagatcacctgaggtcaggagtttgagaccagcctggccaacacagtgaaacctcatctctactaaaaatacaaaaattagccgggcgtggcaatgcccacctttaatcccagctactccggaagctgaggcaggagaatcgcttgagcccaggaggcggagattgcagtgagctgagattgcaccactgcactccagcctgggcgaaagagtgagaccctgtctcaataaataaataaaaaataaaatgagacatttagttactgtgttagtccattctcacattgctataaggaaataccgaaggctgggtaatttataaataaaagagctttaattgactcacagttccacacggctgggaaggcctcaggaaacttacaatcacggtggaaggcacctcttcatagggtggcagaagagagactgagagagggagaaacttgccaaacatttataaaaccatcagatctcgtgagaactcactcactatcaggagaacagcgtggggaaaccatccccgtgatccaatcacttcccaccaggtgcctcccagacaaattgggattgtggggattacaattcaagatgaggtcaggtaatggctcacacctgtcatcccagcactttgggaggctaaggcagatggatcacctgaggtcaggagttcaagaccagcctggccaatatggtgaaaccctgtctctaccaaaacaaacaaacaaaaattagctgggcatgctggcgtgcacctgtggtcccagctactggagaggctgaggtgggagaattgcttgaatccaggaggtagaggttgcagtgagccgtgatcatgccactgaactccagcctgagcgatgaagtgagaccctgtatcaacacacacacacacacacacacacacatacacacacatatacacaattcaagatgagatttgagtggggatatggccaaaccatattagttacctaaaagcaaacaagtggatgtaaataaaatattaagtaactgatggtatgcacagcacaggaggaagttttttgaggaggactaaagtgaggacaggttgaatcacctccttgaaatgtgctgacacccaggcagcatgggctttcatagacccattttacagtggaagaaactgaggcttggggtggtggagtcactggcccagggacatgtttggaacacaggtcagccctactacagaagctgtgctctttccttccctggcggtcctgcctctggatgttttctcgaactgttccaaccagctggcttttcctctgcccatctctgccactttttgcccctgccacctccaggaagccctcctgactcttccagcccattgcccctgggtctttcatcactatgacagctgggctggggtctggcacaggaaggggcttatctacctgtcccacagaagagagcacaccatggagctggccggatacctgttgagtttgtgagaccttgcattggtgtgaaaagggttaactcacttcatttgcatactgtgcccagattcgtcttgggaatacactgcagcataattgaagagaggaaggggagttgcagataccctggaggggtggatgaaggggaaagggcttattctgagcaaaacgagaggatcctgagctgggggaggggaaaggatgtagggcacagatcaccctaactgttgtggggccactgagaatgatattcttcttcccagggcacaccaacttcttttttcctgcatgttttccatatttttccctcagactataataaggttaatcttggtttacatagttcggacacatagcacatccttctgaaagttgagcaaacagcaatcttaatgggcaattcaacccactccgtgttaaccactatgcagaccagcgtgtaagtcaatcaataaatatccatgagcggcttctagttgagtttaatcacatgcagttcttagagtagcacacggcacatagcaggcacttaatagatgtcaccatttttttggtttgtttttaagacggagtctcgctatttcacccaggctggagtgcagtggcgcgatcttggctccctgcaacctccgcctcccgggttcaagcgactgtcctgcctcagcctcccaagtagttgggactacagggccgcaccaccatgcctggctaatttttgtatttttagtagagatgaggttttgccatgttggccaggctggtctcgaagtcctgacctcaggtgatctgccggccttggcctcctaaagtgttgggattacaagcgtgagccaccgtgcccggccgatattgttatttcacaccttcagaggagacagcaggcgtggatgtgaacttaaccctcccgctgccacccttgctggctcccacccaccctggcccacagggaatggcttggaccaggaggctgagaccatgagacggcgagtgggatcgtcctggcagcggagatgttgctcaggataaaacgggaagggctaaataaatctgcttgagatgtgtcccaattacccgctcaaactcctctgcctgtgcctggcactctggggccctggagaggggagtttttctgatgccctagaggctcggggctgctgcagcatttcagatgcagcacaccagtcccccagcctgtggtccctgtccttgtcccccaatattgtcataactttttttggggagcggaggaacagaaagaaacccaaatattgggatgtttctgagctgggaaggccccgacatagaacaacagaaccttccattggatgaccacttgttatgtgctgtgggccaagaccttcccaggcagctgggcagcaaaaatccacgctatgagatcagactgattatttttgttccctttttgcagctgagcaaactgaggctcagagaggaaagggtggtactgaccctccaatagcttgggagaggcagggctgggcttccggccttaggtctgactccggctcattccttaattcatgaatgcagccaacggatatttattgagcaactcccaagtgccaggtactgttctaggcaccaggaaaaagcagggaacaaaacaggccaatatctccagccctcacgtgctgacttttttaatgggggagatgaaccagatttaaaaaaaaaaaaatgtaccacgggtcagatgggacataccagggaggaacatggaacaggaaacaggaagggttgggggtgtcattatacataggtggtcacagaaggcctcactgtgatgggttttttgtttattattattattatttcgagacagcatctcactctgtcacccaggctggagtgcagtggcacaatctcagctcactacaaccttcacctcccgggttcaagcaattctcctgcct[134 bp omitted]tgcctcccaaagtgctgggattacaggcatgagccactgcacccggcccatcactgtgatgtttgaacagaggccaggatgaagtgggagaagagctttccaggcagatggcacagcccatgcaaaggccctggggcaggaccgtgcctggcgtgttggaggatcagcaaggaggcccatgtagctggagcagagtgaggagtgggaaagagggagtagaaaaggcaggaacagggcagggtgtgcagggccttcttggccacaggaagacttgggcttttcccctgagggaggcgggagccatggagggtcataggcagaggaggggcaggacctgattcagatgctcacaggtgccctctggctgctgttgcggggaggacagactgtgaggaggcagggtgggactcaagggaccagggtggagatgactacactggcccaggtgggcaatgctggggctggatccagggagaggctgagggagtgggagaagtagccagtctggggacagacagagacagagtgaccctcagccaagcttctgacccgcttgcaggctttctggggcctggacaacctgcaggcaccaatgagggccacatgctcatcattaacccagatgatgggggttcagggggctgctgcctgatcaggatttgacccacgggtgtgcaccaatcagagttagtacacagaactcccaagtctcctggcctctccagctgctacccccaggccctgtgcagcaaggtcgaggaggacacacccccacccccagaccgggccgcctgtgcccccagtgactctgtgtattggctcctgttctacccttttgcatagctgtgcattcccctgagcactttagcaggagcccccagagggcggagcaggaggcaccggtgacatcattctcagggccagccactcccagtgtgcaccagacctgatcaagatccaaagacgaccagagttcccagatgacactggggctgcaggcggtgcctgaaatagcatttcacaagtgcagcctctgttccaggcactgttcctggggctttgcaatgacccctgccctcgcagtcctaggtctgtgctgttactgccatattttatgggcgagacgcagaaagcctgagcaccagcccatgcctgcacaacacagccaggactggaaactgtctctgggcaaaggctgtccctaggtctctggtgggagcccgctctgccctcaaatcaagggaaaggtgaggggcctgagaggtcagtaatcagtggatttctcagagcagagatcccttcccaatacgaactagacttgcatacttccagggatgggaccctcactccctgtacaggagaggtgccttggttttggacaatgctgagagttagacaatgtttcctttcagccacttgggctccctctccttcttttaatctccctcctttgactctgctcctcctcttcggaaactgcgcagaaaaaaaatcgccctctcccctcctttcctctcttctccatccttcctctttctttcctctccctccacatctttctctacttcctcccccccatctccctttctccttcctgtccctttttcctctctcttctcctctccattctcccaccccttcctcccctcctctcctctcctcttcctccatgaaatattttcagctgttcctctgagtatcagaacttgatagaaaagatgattccccgaatttggagtcagacacttcactgcctcaaaactgtgtcgccctgggcaagtcatatcatctctttgagcctccatttcctcatctgttaaaaaaaaaaaaaaaagtgatattccctgttttggtttcccctgtagcctcagtgactagctcagggcctgggacacagtagttgctcaataagtgtttgccaaatgaatgaatgttggcaccctttctttttcctttcacttctgggcccattgattattccttgtgtgccccaaatccaaccctgctcaagagagggcttggctggaccttgtgaccagtgtggaactgaaaaattagacaaagtctgcctcctggctttcttcctcgttgaacaatttgcatttaaatcatgaactgtaatagttagttatgtcattagctgcttaacatgtcttcccacgcattctgtgtgccaagagggcagggcggggagttttattcacattgttcatgcttgtagttccagcacctcggacagcacctgtcacacattaggtgctcaataaatgcctgtgtggtggctgaggggtggggtgggaggatgaacatagcatgctataaccttttctgcttcctttttccttatgctccaatctatgaagttttctgaatcaaacacactcctcttagtgaggttccaggcagagaacgtggcatgatcacctccctttttttgcgctccatactcctgttaatgcaatcagcacttttctccctttttctgcttttcttcttcaggagaggaaaatgttaaaaatgtgatgatgcagtcggaagtgttttaagccttcagacaattcagacttgagaatcaagtgatggaggaagagctaaaaaaaaaatacattctcgtttattaggaggagaaagaaagtgccatctcaaaaagatcgaggctcgttaatgctggaatataaagatagacacttcctgtcctcgacaggcaaacttcacccacagctgtgggcgccaggccctcaagagtggctggggcaggacggctacaaagagaatttgattgctccggagttgaagcccaacgtgttcgaggagtcatgccaagattcagtgaaggtcacacaggatgcgagctgctgtggggaggggttgtccttgggactctcctaggacacgggaaggctccacctccatgagaagaggattcatcttcctagtctgttacatgcaaaggtctcgtctgagccaagtcttgcacagatgtcccttttcccggggaaggaagtttctagcaaacacccaggtactgactgcatgaccttgggcacatgtcaccctctcgctgggcctcagtttccccatctgccaaatgtagagaatattttaatacttaacacgctaatagtagctatgatgggttgctgttattattagctgttcttactcttcttattgttgcttccataatacccctgccagggtgtttgtccagccagcgaggattttcttgaccctctgtccctttgacacatcactagctacctcactcactgtgtgaccccaccctctggtctcaacagattggacctgggtggctatcaccacccaggttatacaaacaggctgagccaatatgattctttctttcttttccttccttttttttttttctttctttctttctttccttctttcttcttctttctttctctctcttctctttctctccttccttcctttcttccttcctccctccctcccttccttccttctgtctttgttttttgctttttgttgttgttgttgtttgtttgtttttgagacggaatttcgctcttctcatccaggctggagtgcaatggcacaatctcggctcattgcaatctctgcctcctgggttcaagcgattctcctgcctcagcctccccagtagctgggatttcaggcatctgccaccacgccaggtaaattttttgtatttttagtagagatggggtttcaccatgttggccaggctggtctgaactcctgacctcgggtgatgcacctgcctcagcctcccaaagtgctgggattacaggcatgagcaaccacacccggccccagaggaattttttaacagggaagggattccatgtctggctttaaaaggtcgatctagcacatgaaggagcaacgtttcctgaaaagtgaaaagtcagcctatatttatccaatgaccccgatggcacaaccagctcattgatgagaaatatttaatagctgtttggggctgcgttgagaaggattctgagcctgtggctcagttctgcagggaaaggagtgctgcaatttattagtgatgcctgggccttgactccctgggaaagagttctgttattgattagtgatgcctgccatggaccattgcatggaccctggtgttctgtttgttatacatttgccttccccgggttaagtagctgctgcttctcagagaaaatcctccacaccctcctacagaggacagtaggatggctccagactcagacagtcaggggttccagtcttggctggactgctttctcgctgtgtgactttagacatgtggcttctcatctctgtgcttcatgttttctcctctgcaaagcgggaacagaaatctcacccacacagagttcttttgcaaatagttttaagtatccggcatgccgtagggttctgctgaggttgatattggcctctccagggccccctcactgcagcccaaggtctgaaggtaaatcagttttatttccagctccagctccaaggtgggttccaactctgcccttgagacctggcagacaccctcagctgcatcttgcacctggggtttgttcccagtgctgccacagacatgctcccacttggtggtggcgtgcatgaaacaagatggacgcagggaccgtttggcttggaactctcctggggaggaggtccccacacctggcgtccactcacctcccggcaagggtgattcttgccagcctgagtggggactgttccgtgcctggctgcttccagcacttggcctgatgtcccgccatcaacatttatgtctgcaggtggctgggaccactctgccttctctgtgaattggcatggactggagggactttggggagctgagggagaagtggacggctcagcagcatcttgctggtgcctgaccgagagatgactttggagacttttct[223 bp omitted]gaggcaggagaattacttgaacccaggaggtggaggttgcagtgagtcaagatcgcgccactgcactccagcctcggcggcagagcaagactgtctcagaaaaaaaaaaaaaagtacagagtgaggcagggttcactcagcctcaggaccaggggggagatgtactcctcccagacaccccggccccttcctggccccctgactttactcccacaccccactcggactttgtaccctccactcagcagccagaagaagatttaaaaacacgaacgtggctggacgcggtggctcacgcctgtaatcccagcactctgggaggccg[135 bp omitted]ggagcaggagaatcgcttgaacccaggaggtggaggttgcggtaagccgagattgcgcgactgcaacccagcctgggtgacagagtgagattctgtctcaaaaacaaacaaacaaacaaacaacaacaacaacaacaaaactggaatcaggtcaggccaccccttctccagacccttccacgggcctcctccagtgctctccccataaagttcatattcctccccagaccccctgcccatctctgagcctcagtttgttcacctgtcaaatgggtctatgagccatcagactgtgagcccacaattggccatcttgttccttgctgtatccccagcacctagaacagcaccagacacacagcaggtgcctaataaatgaatggaggaataagcaagcaaaccaatcagcaaattcattcacacttacaggctcagctctgtccttctgtggcctcagtgactcctgcctggtccacctctggctgcctctctgagctccgtctttctgggattgatgagttgggtctaagcagaggcccagggtacagatgtcactgtggcctctgtgtcccccacctgtgtccccgcagctcccgggctgcagcctgtgagggaagacagatgggctcataatgtccaatgaatcatagccactgcatcccagcctggacacatgcccagcccactcatccgcgggtctgtgacatgtaagagttggcgctactcttcccctgtgtgtgccagaccctgtgtggccacctgggttggtgtcatccaggggaaataacaggctttgttctccccgccccatctgaccggttttctcctctctgccacaaaagtcaacattctggacaagggtgggaggaagtagtgcttccacatttcgcaggaggactaacattaattaagcacttaatatgtaatgggcaccatttggagccctttattacaatttccacatttaatcctccaacaatcctattaccagccccattttacagatggggaaactgaggcacaagtgacttgcccaaggcgcagagccaccaagagtgcttatggcagtattgtctccaatagcaaaaatggaagcaacctagatgtccacccatggggaatgattaaaatactctgtttttttgttttgttttgttttgttttgttttttgagatggagtctagctctgtcccccaggctggagcgcagtggtgcgatctcggctcactgcaagctccacctcccgggttctcgccattctcctgcctcagcctcccaagtagctggaactacaggcccccaccaccacgcccggctaatttttgtgtttttgtagagacggggtttcaccg[137 bp omitted]gcacacacctgtagtcctggtgactcgagaggctgaggcatgaggatcacttgagcccaggagttggagggtacagtgagctatggtcacaccactgcactccagcctgggcaacagagccagatcctgtctctaaacaagaaaacaacaacaacaaaaaaattagaccaggtgtggtggctcacacctgttatcctaccactttgggaagctgaggtgggggggttgtttgaggccaggaatttgagaccagcctgggcaacatagcaagaccccatctttaaaacaaattaaaagaaaattagccaagcactgtggcacacacctgtggtcccagctactcgggaggctgaggcggggggatcacttgagcctggcgagtggaggttgtagtgagcagagagtgacaaagaaagaccctgtctcaaagcaaaaagacagagagaggaagaaaaaatttaaaacccagtctggttccatagaataccaaaaagaattgcaaacaagtgttcaaacaaaaactagtacacacatattcataacagcttgattcgcaattttcagaagctggaaacaacctaacagtccgtcaacggatggatgaataagcaaaagcggtccatgcatgccgtggaatatattcagccataaaaaggaatgaagttctggccgggtgtggtggctcacgcctataatcccagcactttgggaggccgaggcaggcagatgacttgaggtcaggagtttgagaccagcctggccaacatggcgaaaccctgtctctactaaaaatactaaaattagccaggcacggtggtgcatgcctgtaatcccagctacttgggaggctgaggcaggagaatcgcttgaacccgggaggcagagg[133 bp omitted]gctcagtgagaggagccagacacaaaagaacagagactatatgattccagttattgaaaatgtctagaataggcaaattaatcaagacagacagcagtgtagaggctcaggagaggaaagcgggaaggtattgcttcatgggtacagagtttggattgataaaaatgttttggaagtagatggtggtgatattgaacaatattgtgaatgcactttaatgccattgaacatttttatttttattttattttattttattttattttattttatttatttatttattactttttgggatagagtctcactctgctgcccaggctggagggcagtggcgtgatctcagctcactgcaacctctgtctcccggattcaagcgattctcctgcttcagcctcctgagtagctgggattacaggtgctcaccaccacgcctggctaatttttttgtatttttggtggaggcggggcttcaccatgttggccaccatacccggccccactgaatatttttaaatgaataaagtaataaagtttctattatgtgtgtaatttaccaccataaaaaattaatagtctgggccagacgcggtggctcaagcctgtaatcccagcactttgggaagccgaggcgggcggatcacctgaggtcaggagttcgagagcagcccagccaacatggtgaaatcctgtctctactaataatacaaaagttagccagacatggtggtgggcgcctgtaatcccagctactcgggaggctgaggcaggagaatcacttgaatccgggaggcagaggttgcagtgagcagagatcgcacaattggactccagcctgggcaacaagagctaaactgtctcaaaaaataagaaataaataaataatagtctgctttattccctcagtggaatactatgcagctgtataagaattgggagtcattttgttgtgttttgagagaggatctcactctgtcgcccaggctggaatgcagtggcacaatcgtggctccctgcagccttgacttcctgggctcaagcgctcctctcacctccacctcctgagtagctgggactacaggtgcaccaccatgcctggctaattttttatttttatttttagtagagatgggggggtctcgctatgttgtccagagtggcctcgaacccctggcctcaagtgatcctccagcctcggcctcccaacgttctgggatgacaggtgtgagccagtgtgctcagcagaagtgagaatcttcgtgtactgaaaagaaatgatctcgaaggtgtcttgttaagtcaggaaggtgcagaacagcttgtgggtacacatgcgtgtgtgtgaaaaaagcaagtaggcaagaaaaatatacacacaagtgcttgtgtgtacataccctgtccctggaagggagacaggggacatgggataacaacggctacctctggggatggttactgggtgatcagggccaggacagggaggggaattttgccccccataccttgaaaggcaaaaaaaaatgatagtaaaatccagctctgggccagtcgtggtggcccacgcctgtaatcccagtactttgggaggccaaggtgggaggatcccctgaggtcaggagttcactaccagcctggccaacatgataaaaccctatctcgaccaaaaatataaacaaattagctgggtgtggtggcgcatgcctgtgatcccagctacttgggaggctgaggcaggagaatcgcttgaacctgggaggcagaggttgcagtgagccgagatcgcaccaatgcactccagcctgggtgacagagtgagactctgtctcaaaataaataaataaataaataaaattaaaaagccagctctgccttgaacaagctgtgtgacctcaggcaggtcacttcacctctctgtgccttagtgtccttatctacaaagcaagcatgatgaataccagctcagaaggatgaggatgaggctgtactgcattaatactaatagggtgctggaagtagggtttggcataacacaggtgccatctaagcatttctcttgagttgggtactcttttctgcctttatctatccaaacaaagaaatgtctaaaactcaagtttttgaatgcggaacgaagggtgtatggagagtgtttagctcctggtgcccagcccatgtttggcatctgcagcctctgggctggtgagctcaccccttctcttctccactccttccccggaccatccccagtaacccagcctcagagcaagtgatgcaacctggggaaaccgagtccctctggccacgggtgctcccaccacaccttgcctgcatggaagatggagggcctcctagcattttgttctcaggggatgtggaacgaggatgggaagtgcctcccagtcaccttaattagcatctcagaggagctggttgccatgacatcgggaggaagttgctggccggggcggagcctggcccaggttgccccaggagggaccccatttctctccacccaccagtggctggcctggccaagtccctcagctctggactcaggctaagttgggtttccatccaagctttacttctcaccatctgagacttttcctcttctgggaagtagaaactaattttaaaaagtcttcctaggaatattgggagaatttaatgggatataaaatgcccagtgctgggttcggagacttaactattgttattatttcctttggagaaagtggttttaaatatgacccccaaacttttcttctttctctttctctctctttctttctttcttttttttttttttgagacggagtctcgctctttcgcccaggccggagtgcagtggcgctatctcggctcactgcaagctccgcctcccgggttcactccattctcctgcctcagcctcccaagtagctggaactacaggcgcccgccac[187 bp omitted]ttctctttctttctttctttctctctctttctttcttttctttctttctcgctctctctttcttctttctttatttcttcttttttttcttgctccatcatgcaagctggtgtgcagtggtgcgatctctgctcactgcaacctccgcctcctgggttcaagtgattctcctgcctcagcctcctgagtaactgggattacaggagggcactaccacgcccggctaattttttttgtattttttttagtagagtcggggtttca[131 bp omitted]tcccaagaacacacttcacaacgttagtagtggttacgtctaggggctggcgatattaataataactgacacatttcatccccccaatgactctgagatgggagtggttgtgcccattgtatagatagggaaactgaggctcagagaggggatgcagcctgtcgacagtaactgggatttgaagccaggtggccaactccctgacactccagaccaccacaggactgtgaattactcctttcttttcttttctttttcttttttgttaatagagatggggtttcactatactgcccaggctggggtgtagtggtgcaatcatagctcactgcagacgcaaactcctgggttcaagcgatcttctctcctcagcctcctgagtagctgagactataggtgcacagaaccatgcctggagaatttttaaagtttttgtagatatgaggtctcactacattgctcaggctggtctcaaactcctggctgcaagggatcctctcgcctcggcatctcaacaaactgatattacaggcatgagccactatgactggtctgaatgactcatttctaagttcattggttggtgggggggtgggtctggtccacaaacacttcccaacctgaggataaggaggccaccctctaagcagtatctgggggccagcctatgaagcaagcacgtctatataacctcccctctccacccctcctctcaagggaggaagctgggggtgctgaggcccagagagaggctctgccttaggttatgcagcaaacctctgcagtggtctctacctctccatctatctatctctgtccaggtctccagggagggtatgagaagtagaaataagatgtagtgatttaaaaaaaataaaagcaagattgatgctgctgctaaaggatcttctgattcaggagacatcagagagcagcattttgggtgcaagtggaggttgggtcctccaaccttgctccagggccagataagccccccccggagggacttttttcagctggtgtgaatgttgtgggccctgagacttggaccccataagagtccctcagagaaaggctgtgtgggcaggagctctgccccattcaagtacaaccacagcctgggagagcaagggacagcctgacaggctctggtccgttcaaccaactcaagttagtgatgatgctggcgaggccatgtgttggcagtagggggaaggaggctcaggaagaaaccaaggaggcaaactgggtagtaccttgaggatctcaagggaatggccagaggggcaggtggatgtggcagcacaaacctggagatagaacagagcatagggtgtagaatgtgtagacactgaagggatgggggggagaatggatgtgttagaattattggatgggtggatggatggagacataaatggttgggtggatgggttacagatgggtgatgagtgctgcctcctggcttcagctgctatgggtggatgatagatgatagacgggagaacggatgatggatggatggatgaatgattgatcaatgaatgggtaagtaggtagatacatggatcagccagtgggtggatgggttatagatggatgatagatcatgggtgagcaatggatggatgaatgagtaagtggatgagtgactggtggatggattatggatggataatagatcatggatgggtgatggatggatgacggatggatggataggtaggtggatgagtggttgggtgggtgggttatggatggatgatagatgatagatggatgaatggatggatgaatgagggatagatggttggatagatgggtaggtgggtgaatggttggatggatgggttatggaaggatgattggcgatgtatggatgaatgagtagataaatgaatgaatggatggatgggttacggatgagtatagatcatggatgagtgatagatgaatatatggatgaatggatggattgattcgtggttgggtggatgggttatggttggatgatagatggtggatagacggatggatgaatgaatgatggatcaatgaatgggtaggtaggtatacagatggatgaaagcatgggtgaatggatgaatggattgttggatagataaatgggtagcactactaactgtaatggcaacagcccagtgataccagttctgccttaccaagaagaatatgtactgagcacatgacttcactaaatcctcagactgactgagtgtggggttggctgtggccctgatgctttcactctacactcggggtatccga[186 bp omitted]ggtggcgggcgcctgtagtcccagctacctgggaggctgaggcaggagaatggcgtgaacctgggaggcagagcttgcagtgagccgagatcgtgccactgcactccagcctggacaacagagctagactccgtctcaaaaaaaaaaaaaaatctcagtggtgggctcttcccagtactattctaagatttcccttgtccaggtggcttcccagtgtccaaatccagtgatcacttctcagcacccatcctcctcatgctcctagcaacatctaccctgggtggtccctcctcctgggagcatcatcttcacgtggcccccagcgtccccacatttgcctgcattcaccctcctctctgttggactcttctcagtctctctgcaagcttctctctgcaagcttctctcttctgctcagctgctaaacacagggtagtccttgagcatagtctctgtctcctcttctcattcatccccatggacatgaatacattctaacaccatggactaacaccatggacacgaatacattctaacaccatggctagtaaaagctagctctgggccaggcgcggtggcccacgcctgtaatcccagtaccacggactgtcagatttatgccttcagaaggcatctcttctgggaacatcagaatcttatatccaaatggcccgtctgcatctacatgtaggtgcccaaaaggcagctcaaacttaacaggccaaagccaaaccttggtcatcacccctccccatcctgtggctcctaccccatcctctatcatccatccataatatatctacccaaccattcattcacccactcattcaaccatccattcatccactcatccatccctccatacacccatccatccctccatacacccatccatcatccatctattcatccacccatccccatccatccatttatccatccattatctattatccatccatgacccattaacccaaccactcacccacccacctacctatatattcatccatccatccatccatccatccgtcacccatttattcatctatccatccattcactcatccatccatcacttattatccataaccgatccacccaaccactcactcatccatccatccacccatccatccataatttattcattcattcatcatctatatccatctataacacatcaacccgctcacttatccatccatccataattcattcattcatcatctattatccatccgtaacacgtccacccacccactcttccatccatccatccatccatccatccatccatccttattcatccattttcatcctccccaaactcatactaataggttgcacctctaacatccaaggggctcaagtcagaaaccctggaatcaatctcaagtcaactcttttcctcacatttcaccatcagtcctttagaaaatcttgttggctctgccttcaaatctattcacaacctgcctacttctcgcccctcttttacatccccaggtccagccccatcattgcctgcctggaccagtacagttgcttctgccctggtcctcacctcccctgctcactaacccatcagaccgttcccccctcagcagccagagggcgcctgtgagcacctgagtcaggtcctgtccctcttctgcccacagccctccatggctgtcacctccctcagagtcaaaaagcaagtcctctctgcggcccacaaggctctgtgtgacctgccttgacacctcctcctccgtctctttcccttgctcactgtgctccagccacagggttttcctcaatgtttctccaacgcaccaggtggggtcctgcctcagggcttccgcgtgggctgtgccttctatctccctcccccacctccacctcctttggtctctattgaaatggcgcttctcacagagacctcccctggccacttccccacatttatctccgtcagagtctgttctcctttactgcttgtttccagcccaccccaccccccgcccctcacccttagctcttaccaccatctgaccccctgtat[139 bp omitted]cctcagcctccccagtagctgggactacaggcgcccaccaccacgcccggctaattgttcgcatttttagtagagacggggtttcaccgcgttggccaggttggtttcagtctccagaccccgtgatccacccgcctcagcctccccaagtgctgggattacaagtgtgagccacagtgcccggccacttgtgtatttttgtcttttagacagagtctcctcctgttgcccaggctgaagtgcagtggtgtcatcatagctcactgcagcctcatactcctgggctccagcgatcctccctcctcagcctcctaagtacctggaactataggcacaccaccatgccctgctaatttttttttcagagatgggatcttgctatgttgcccaggctggtctcaaactcctgggctcaagtgatgctcctgcatcagcctcccaaagcattgagatcacatgagtgagcagctgtgccccacctacttgtgtgggggggttttctttgttaacatgtaacatcagctcttcaaaacagagatcttcattctgtcaaatttgctatttcctctcagtacctagaacagtgtctgactcagttaataggtgttgaataattaaatatctaaagtaagccccaacccattcgttgagcacccactattgccagatgctgaaaagcttgtccagaaaaagagaaagtggctaaacccatgcagagaccacaccccaaaccagttcagaaaggcggatcacctccaaaatgtggcaacaagaaaggaagtctgccggttgcagtggctcatgcctgtaatccctgcgctttgggaggatgacacaggaggatcacttgagtccaggagtttgagaccagcctgaccaacatagcaagaccccatctctaaaaaaatttttaaaaattagctgggcatggtggtgcatacctgtaatcccagctgctcgggaggctgaggttggaggatcacttgggcccaggaggttgaggctggaatgagctatgatcataccactacactccagcctaggtgacagagttagactctgtttccaaaaaaaaaatcccaaaaaacaaaaaaaggaagtcctttccgtctgggctttccttgcctcctactctgagccactagtttcttcaggcatcctgaagcgtggacttgcctcccgtttgctgcacacgggcccccatccctggctctgctccttctctcacaccctcagttccctagtttgaggaagtttttcttccgagaacgttcacgcaagcctttcgcaccctgggccagcgacacgtgagcctagaaaaaagcttaaaggtcaatgtctataactgaattttcctctatataaaaatagcatctttgtaatcgtttaaatggctctgagggagggagagagggagcgagagagagaatgagggagaggacgagaggcaccgagggatgctgtgtctcccagccagcaggtgcatgtgcgagggcatttgtatggatacgcgtgtgtgtacatgtgtctatgtttgtgtgtgcatgcacctgtgcacatgagctcacgtttgtgtgaattgtgagtatgcatatgtgcatttcatgtgcatgtgcatgcatgttcaagttttgtgtgtgcatgtgtgcctgtgtgcatgtgtgcctgtcattgttcacgtgcatctatgtgcacacatgtctctctgtgtgtatgtctgcctacaggcatgagtatgtgagcgtgcatctgtgtgtgcaggcatgttcaatgcatgtgtgcacacatgtctctgtgtacacatgtgcctaagtgcgagtgtgtgtatgtatacacatatgagtccatgtgtccatgtttgggtgtgcatgtatatttatgtttgtgtgaattgtgtgtgtgcatgcgttcgtgaatatgcatgtgcgcacatgtgcttatgtgcatctgtgtgcatgtgtgggtttgcatgtatgtacatgtttatgtgcttgtgtgtctcttgtgtgtgcaggtctgcctacatgcatgagtgtgtgagtgtgtatctgtgtgtgcaggcatgttcaatgcattgtgcacacatgtctgtgagcacatgtgcctaagtgcaagcatatgcatgtatacacatgtgtgtccatgtgtccgtgcttgtgtgtgcatgtatgttcatgtttgtgtgaattgtgtgtgcatgcatttgtgaatatgcatatgtgtgcatgtgtgcacatgtgcttgtgtgcatgtgtgtgccagtttgcatgtatgtgcatgttcctgtgcacatgcgttcacatgtaatgatgtgcacatatgtctcatgcgtgcatgtgtgtgcatgtatgttcatatgaatgtgtgcactcatgagcatgtgccacatgtctctgtgtgcatgtgtgcatgtatgcctacctgcatgtaggcacccgtgtttgtgcatgagtgtgtgcacaggtttgttttgtacacactgtctgggacctgccttaagcttcaggtgtccattccccattccaccagagtggctgcctacacttggaaaatgaacaggatctggtctcaagccttcctgagctccaaccagccctgcctgagcgaccttgggtgtatcatctgtcctgctgagcctcacattttccccacgtaaactggcgtgtggggtgagcacagccacagagagctcctctggctgagtgccgagtctgtgaggaaccggagctgggggttcagctgcagttggagctcgacctggatgaatggatggcacatggaggatgctggtgagtgacccaaggaggggtgagtgaggtgggtgtgggcttcttctctgggcctcggtttcccctccttaccctggagagttggactcaagcctctcttgatccttctagtgaaaagatcccacacttggctgtatcggggttcctccttctgtcccgcattctcaaatccccccacctcattcttgagtgtggcctgggagtgaattggaaaggctctctctgggcctcagtttccccagccataatagagaaaagtcacttagatgggtccagaggaccatacccctctaacattcaggaatgtcctcatggaaatacatttcctccctactaactttcaacagaggaaagtttatcgtcatctgaccttgcctttttgtttctgtttttgtttttttgagacagggtgtcactctgttgcccaggctggagtgcagtgatgagatctgagcccattgcaacctctgcctcctgggttaagcgatcctcccacctttgcctcccaagcagctggattacaggcatgcaccactacactcatctaatatttgtatttttagtacagatgggatttcagcatgttggtcaggcaggtcttgaactcctgacctcaaagtgatccacccccctttgcctcccaaagtgctgggattacaggtgtgagccactgtgcctgactggagtgcttttctcccaagagatccacttgagtcctcccttctcctcttcaaatctttgctcaaatgtcacctcctcagagaagccctccctgactaccccagctaaagaaaccatgtctccaccactgtctacaccctcaccctacattatttttcttcatagccctttcaaaaccattcattatcttgtacctcgatgagtgaccatgcctcatcaactcgaaggcagccatttttgcctgtctttctgttgcaaattccaaagcctagaacagaacttggcacacagtaggtgctcaagaatacttgttgaatgaatgaatgaatgaacgaataatggaaggtaggaggctatgactgcccattcacagatatggacacagtggttcaggaaacgaacgtcactcagtccaagtcccacaatggtcagtggcaaaagtagggttcaagcccagctggctcgtccctcctgttcttcctcccactcatgccccaggtctgaggggctgcccagctgctgctagcaacctggcttcgacctccaaccattgatccaccagaggctgctctgtgggatgcacttcctgatttagctaaaacaccctgcgctggctacagcggggtgatcgatggccctacagtcagctcaggcacccccaacgcagacacatacatttgaggcctctctctagcccttgcccctgcaatcccaggctgaggtggtcctgctggcgggaagtggatggagcacatgtcgtgtggttctagatggcggtggccacatctcctgggcacctgtattctaccaagaggaaggggaaaagttactgcggtcaaggaaatggaaaatcaaaaccagaacaagatcttgcttcacattgatcagattgggtaaatgagggggaaaatggatgagattaactattgatgagggtgagggagatgggactcatggacagctagtgagccaaggaatggtgggcagcttcgcagcatcaaataaaactgcgttgcagcaactctacccagatctctaacccagagaagatctacatgcgtgtgcaaagacgcctgtttgctaatgtgctctacggagtcatggtggataaactatagaaggtgcatcttatggaaacatatgcagctgttaaaaagaaagagggcccttgcgtggaggctcatgccttgtaatcccagtgcttcaggaggctgaggtgagaggaagggttaaggccaggagtttgagaccagcctaggcaacatagtgagactccatctctgctggaaaaaaaaacaaaaaacaaaactttaaaaattagccaggcatggtggtgtgcacctgtagtcccagctacttgggaggctgatgcatgaggattgcttgagcctaggagttgaaagttacagtgagctatgattgcaccactgtactccagcctgagtgacagagtgggaccctgtctgaaaacagaagaacaagaggaagaggaagaaaaagaagaaagagaaggagaaggagagggagagggagagggagaaggagaggaagaggaagaagaaggagaaggagagggagagggaaaaggagaaggagaggaagaggaaggagaaggagaagaagaaggagagggaggaggaggagcagagaagaaggagaggaagaagaagaagaagaaggaggaggaggaggaggaggaagaagaagaaggctgatccatgtatcctgtcctggcaagggctttttagagacaagtaccagaggtcacctaggctggaatgcattggcgtgatcttggctcacgacagcctcaaactcctggactcaagtgatcctcccacctcagcctcataagtagctggaactaccagtgaacaccaccaggcctggctaatttttttttttttttttttttgacagagtcttgctctgtcgcccaggttggagtgcagtggtagtagctgggactacaggtgcgtgccaccatgcccggctaattttttgcatttttagtagaaatagggtt[143 bp omitted]gttgcccaggctgatctcgaactcctgggcccaagcaatcctcccacctcggcctcccaaaatgttgggatgtcaggcaagagtcactgcacctgggcagaatcaccagttctttgatgcccatgtctgcactcctactctctctgtcctcatttgttcatttattcactcaacaaccgttgtgtgcatggccccgttctagacactgaagactcagcagagatcaagagagacaatatttcctgtacttctggaactcatggaagctggagagagacagaatttgcaagtaagcaaaataaatcgatcatttcattgttgttgttgttgttgagatggaatctcactctgtcgcccaggctagagggcagtggcgcagtcttggttcactgcaacctccaccttccaggttcaagcgattctcctgcctcagcctcctgagtagctgggactacaggcgtgcacaactacgcccagctaatttttgtgtttttagtagagatggggtttcaccacattggccaggctggtcttgaactcctgatctcaagtgattcgcccaccttggcctcccaaagtactgggattacaggcatgagccactgcaccccgccaaaaatgatcatttcagacagtgataactgatgaacagaagtgaaactgggtgaggtggaaaaaagtgataggttggagggatgcagttttagctggggtggtccgggagggcctgtctgaggaggtgacatttgagatgagacctgaatgatcagaaggagccagctgtgagaacatgtggaggaagggtgttccaagtagagggaacagtctgtgcaaaggccctgaggcaggacagtgcctggggcattggaggaacagtgaagaggcctgtgtggctggagcagagtgaggaaggggagagagggagaaggggagggcagggaaggggcaggaggacaggtcatgcagggccttgtgggttgcaaaaaggacttggggccgggcacggtggttcacgcctgtaattctagtaccttgggaggccaaggtgggtggatctcttgagatcaggagttcaagatcagcctgaccaacatggtgaaactctgtctctactaaaaatacaaaaatgagccaggtgtggtggcaggcacctatagtcccagctactcctgaggctgaggcaggagaatcgcttgaacccaggaggcggaggttgcagtgagccgagactgtaccactgcactccagcctgggtgacagagcgagactccatgtcaaaaaaaaaaaaaaagggacttgggctttgaccctgaggaaggtgggaaccatggggggctgcgggcagaggagggacaggccctgactcaggtgctcacaggcaccctctggtggctgcaatggggaggacagactgcggcaggtaagggtaggagccggggaatcaggactgaggcaactgcacgagtccaggtgggcagtgatgggggctggacctggtggagaccacagaaggaggaagaggatgaggttatacacattccacctcacctccctccaccatgagtggctcacctgcagggcagtggcatgtccccagcaccaccagcaccacaagctcatgaatccccagagtcactgcagctgcaaaactcttagctaggagtgccctcagaggcccagagatgtccagtgtcacccgcaggtcgcccgatgaactggatgcagagccagaacttgtgcccttggtgccacctcccctctggctcagctgtgctctgccatctcttccagggacaaagattaggagtttgtttactgatactatttttattgatctttttttaaaacaagtgctcagcaaaaaagatgcacttagccaaactgctcctatgatatctgtgggaattcctctaagctgtcccaggcgtggggactattgggtggcaaaagcacagaacttgatctcttcagatttctttttaatttattattattattattattattattatttttgagacggagttttgctcttgttgcccaggctggagtgcggtggtgccatctcagctcactgcaacctccagctcctgggttcaagcgattctcctgcctcagcctcccgagtagctggggttacaggagcccatcaccactcccaggtaattttttgtatttttagtagt[139 bp omitted]agttccaggatatatgtgcaggtttgttacataggtaaatgtgtgccatggtggtttgctgcacctatcaacccatcatctaggtattaagccctgcatgcattaactatttatcctgatgctctccctcccccgattcccccaacaggcctcagggtgtgttgctcccctccctgtgtccatgtgttctcatttttcagcttccacttataagtgagaacatgcagtgtttggttttctgttccggtgttagtttgctgaggatgatggcttccagctccatctatgtccctgcaaaggacatgatctcgttcctttttatggctgcatagtattccatggtgtatgtgtaccacattttctttatccagtctatcattgatgggcatttgggttgattccatgtctttgctattgtgaatagtgctgcaaagaatgtacacatgcatgtatccttataatagaatgatttatattcctttgggtatatacccagtaataggattgcttggtcaaatagtatttccgattccagatccttgaggaattgccacactgtcttcctcaatggttgaacgaatttacattcctgccaacaatgtgaaagcgttcctatttctccacagcatcaccagcatctgttgtttcttgactttttaataatcactattctgactggcgtgagatggtatctcattgtgtgtgtgtttttttgtttgtttgttttagacggagtctcactctgtcaccagg[178 bp omitted]tatagggtgatcagctcatccaggtttgcccaggactttcctgtttttagcaccaaaattccctcatcctagagaactcagctgcaaaccgatggttggttatgttacgatcacaaggaaaccatgtgagatactgagtaggtgggatgggggttcctcagatagagttggtaacagtttgtccctcatccggttatgcaaagagtcatcgtgataatgcatgtcctggtatatagtaagcaattaataaatgctggcttttggaggttgaggctgcagtgagctatgattttgtcactgtgctccagcctgggtgacacagggagaccccatctcttaaaaagattttttttatttaaaaaaatggtggctcttgcaaggcaggtgagatgttgagggcttgtcataagggcacctatttgtcggagggagtgtttcaagccccttctaaaaagcaaaaagtaggctgggtgcagtggctcatgcctgtaatcccagtactttgggaggccaaggggcagaacatttgagcccaggagttcgactccagcctaagcaacatggtgaaaccctgtctctaccaaaaatacaaaaattagtcaggcatggtggcgcatgcctgtaatcccagctacttgggaggctgaggcaggaggattgcttggacccagaaggcggaggttgcagcgagccgagatcgcaccagtgggctgcagcctgggtgacagagcgagacccggtctaaaaaataaaaataaaaaataaaagcaaaaagtgaccttggacagtccagctcaggatagaggaatgacactcacgctaagacccagtgtgttttcctaatgtaatatgcaagtcctctctcgctctataacattccatagctcccactgccctctagagtaaatccacccctctcccttacagaccccaataacctgtgtgactttgtcctacaactcctgaattacccttagcacccacccatattcccacctccagacctttgaatgcagttttctctactgagatacccttccctgcttacctggaggactcatacagagcccaaaagcagccctttccctccagaagttgctcccaccaataaacaactattcctggagcacctacttcagggatcagcaaacaacggccctgtgggccaaatctgtccccctacttgtttttgtaaataaagttttattggcacacagccatgtccattcattaacctgttgtctatggctgctttcttgctaatatggcagagttgaatagttgggatggaaaccatatggcctgcaaaataaaaaatatttacagccaggtgcagtagctcacacctgtaatcccaacagtttgggaggttcgggtggggggattgcttgagcccgagttcaagaccaacctgggcaacataaaaagaccccatctctacaaataatagtaataataataataataaattagcccagcatgttggcatgcatctgtagtccagctaccctggaggctgacgtggggggatagcttcagcctgagaggttgagatgacagtgagtcatgatcactccactccaccccagcctgggcgacagtgagatcctgtctcaaaaaaaaattttttttaaacaatctggcccttttcagaaaaaatttactgacctctgacctactaggtacctggccctgtgctcaggacatccaggacacaatggtgaaggagacagacacagctctgtattcacaggactcatggtttagtggggaagacagatgaaaaataaaattcatagctagcccacgaaatcagatgaacgtgaagtatggctactttattttatttatttatttatttatttatttatttatttattttttgagacagactattgctcttgttgcctaggctggagtacaatggcacgatctcagctcactgcaacctctgcctcctgggttcaagcaattcttctgcctcagcctccaagtagctgggattacaggcacccgccaccactcccggccaatttttttttgtattttaatagagacggggtttcaccatgctggccaggctggtctcgaactcctgacctcaggtgatccacctgcctcagcctcccaaagtgatgggattacaggcatgagccaccgcacccagccagccactttattttctataatttaacttaatttcagattccgagaccttcatccttccagtatctgtttctctcaggagttcactaactgagacagagagtagaacattggtgactggagactgggggagggggcggagagtgtttcatggggacagagtttcagtttgggaatatgagaaagtttaggagatgggtggtggtgatggttacacgacaatctgaatgtgcttaacaccactgggtggcatgctgaaagatgggtaaagtggcaaatctcattttatgtatattttaccacaataaaagaaaaaagacctggggggaagaaacaagtgaccaactgagagattattgccaaaaccataacaaaggatgtgaatatataaagagctcttacaaatcaacaagaaaaaattaaaaatgggcaaagcacatgaacaggcaattctttttttttttttttttttttgagacggagtctcgctctgtcacccaggctggagtgcagtggtgtgatcttggcttactgcaacctctgcctcccaggttcacgccattctcctgcctcagcctcccgagtagctgggactacaggcgcccgccaccacactcagctatttttttgtatttttagcacagacgaggtttcactgtgttagccagaatggtcttgatctcctgacctcgtgatccacccacctcggcctcccaaagtgctgggatgacaggcgtgagccaccacacccggccacagtgagatacttttaaaatgcattagactgggaaaaaaatcagtttgcccataggcagtgttgagaagtcatgagatgtggattcaatgtggatgctgaacaaacatcttgcctgtattgattcccaaactgaacatcttccctaggcttctctgtttgagtaaatggcacccattgtctaagctcaaaacctggagttgtctgtgcatccttcctctgcctccactgccaaaatatattctagcccccttcctctctctttcctcactgctactgcacaggtccaagccttcatcatttgtcatccatcctagtctcctattccacttctgcccactatgatctattttccccatggccatcctcagttcaaaccctgcaatagctcctgctgttagcacaaaagtatccatttcttgccacaggcaagatccttcaggatctacttcattccctccatgttagcctcccgcttcccactttccccacctgtcctctcctctccagcactcagatttcctcactgcactcttattataattattattaaggtttgtttatttagttattatactggtaaaatgtacataacataaaatttaccattttcaccacttttaactatatcattcaatggagttaagtacactcacaatgttgtgtagccatcaccactatttccagaacttatcatcattccaagcagaaactctgtacctgtttagcaataactctccattctcttttcccctcaacctcgagtaacttctcttctattttctgtttctatgactttctgttgctatgactttttttttttgaagcagagtcttgctctgtcacccaggctggagtgcagtggcacgatctcagctcactgcaagctctgcctcctgggttaacgccatttttctgcctcagcctcctgagtagctgggactacaggcgccgccaccacacccggctatttttttgtatttttagtagagacgggatttcaccatg[137 bp omitted]ttgtgtctagtttctctcccttcctttccttccttccttccttctttccctccctcctcctcctccttcttctttttcctcctcctccttcttcttcccctcctcctcttcttcttcttcctctgtttctgtctctttctctctttcttcgtttcctttcctttgtttctctctctctctcttttccttcttttttacttgagatggggtctcactctgtcacccaggctagagtgcagtggcatgatcatagctcactgcagccagcctcccaagtagctgggactacaggtgtgcaccaccacacccagctaatgttttaattttttgtagagatggggttttgccatgttgcccaggctggtgttgaactcctgcgcttaaatgatcctcccaccttggcttcccaaagtgctgggattacaggcagtagccactgtgccaggctagcttattttacttagcatgatatcctcgaggtttgcccatgtgtggcatgtgtcagaatccccttctattttaaggctgaataatatcccattgtatggatggaccacattgtgtttattcattcacccatccatgaacatgggctgcttccaccttttggctgttgggaatcatgttcgtatgaacatgggtgtgcgagtgtctgttagagtctctctttttagccgggtgcggtggctcatgcctgtaatcccagcactctgggaggccaaggcaggcagatcacgaggtcaagagatcgagaccatcctggccaacatggtgaaaccccttctctactaaaaatacaaaaaattagttgggagtggtggcaggtgcctgtagtcccagctactcgggaggctgaggcaggaggatcgattgaacccaggaggcagagattgcagtgagccaagatcaagatcatgccactgcacgccagcctggcgacaaagcaaggctctgtctcaaaaaaaaaaaaaaaaaacagtctctcttttcattgctttagggcacaaatcctcagggtttttttgttgtttgtttgttttttgagatgaagttccactctgttggccaggctggagtgcaatggcgtgatctctacccactgcaacctccacctcttcggttcaagcaactctcctttctcagcctcctgtgtagctgggactacaggcgcacaccaccacacctggctagtttttttttttttgtaatttcagtagagatgaggtttcaccatattggccaggctggtctcgaactcctgacctcagatgatctacccacctcggcctcccaaagtgctggaattacagacgtgagtctccacacctggcccctcactgtcctttgaacataccaggcatggcccctgccgcagggcctttgctctggctgtgccctctgtctggaatgctctcttccagatctttccatagatggctccttcttatctaaccgtggtaccatcatgctgacccagccatcgctctccaccaagatactggactcctgccaccgtggacaggacacatcatcacctccctacccagagaaatttcacactagcctggctgggacaacctctatcattccaagcccctctgcatgcccttgaatcctgcctttggacctgcttcagatgccagacacagccaaggggaaatcataaggaacacatcaatcagggtggatgacaattgacaataacaaaaacaataattacactaatgtcaacagcagttataaaacaaggcggtgggacgggcgtggtggctcacgcctgtaatcccagcattatgagaggctgaggcgggcggatcacaaggtcaggagtttgaccttgtgtcaggcctggccaacatggtgagatcccgtctctactaaaaatacaaaaaattacctgggcatggtggcgggcacctgtaatcccagctacttgggaggctgaggcaagagaatcacttgaacccaggagaaggaggttgcagagagctgagattgtgccaccgcactccagcgtgatagacagagccagactccgtttcaaaaaaaaaaaaaaaaaacacaaaacacaaggccgtgcacagtggctcatgctataatcccagcactttgggaggccaaggtggagagatcccttgagctcaagagttcaagaccagcctgggcaacatggtgaaaccctatctccacaaaaaacagaaaaagtagctgagtatggcggtgcactcctgtaatcccagatactcaggacgctgaggcgggaggattgcttgagtctggaggcagaggttgcagtgagcgaagatcatgccattgcactctaacctgggtgtcagaccaagactccatcaaaaaaaagaagaaagaaagagagagaaagaaaggcaggcaggaaggaaggaaggaaggaaggaaacagaccaggcgcggtggctcatgcctgtaatcccagcactctgggaggccaaggtgggttgatcacctgaggccaggagttcgagaccagcctgaccaatgtggagaaaccccatctctactaaaaatacaaaactagccgggcgtggtggcacatgcctgtaatcccagctactagggaggctgaggcaggagaatcgcttgaacctgggaggcggaggttgtggtgagccaagatcgcaccattgcactccaacctaggcagcaagagtgaaactccatctcaaaaaaaaagaaagaaaaaaaaaaacaattataaaatagccaccgtgcatcacctttctaccttgtgctgagcatggtgctaggtgccttatgtgtgacatcttattgaatctggagagatgaggattatcggtgcaccatttacaaatgaggaaactgaggctcagccagaggaaagcacctgcctaaactggcaataccaggactcgaacccaggtcagtctgctgcatacctaccaggcaagtgctcctagctcaagtccccagggaatacaattaagcacaaatccacatagggtgggttgtaaaggctggaatggggcaggtgcgtcccactggcttcctgtgatttgtccacagcagcaagtaattagttttttttgtttttctttttacttttttttgagactgggtcacccaggctggagtgcaatggtgtgatcttggctcactgcaacctccgcctcccaggttcaagcgattctcctgcctcagcctcccaagtagctgagactacaggcgcccaccaccacgcccagctaatttttgtattttttagtagagatgaggtttcaccgtgttggccaggctggtcttgaactcctgacctcaggtgatcagcccgctcagcctcccaaatgctgggattacaggcgtgagccactgagcccggcctaattagcttcttattccatctcctccttggtttccatatccgccatgcaggcgccacacacatccccattttacagatgagaagaatgaggttcagcacggagaaatctctcgtttgaggtctcctaggaggattcatgtccggacagccaaactctagtccccaaggcggcaccacctggccctgtgcctggctgctcggtggcattttgctttattatttcccaggcgccctgttaatcgtccgcaccaagcgattagcacgtcatttatatatggcctggtgtctaattgtccagaccgtggagctggtggctcaaaacctcccttcctaattgtcttccctgcacaattagtaccttgttatatacagctctgtggtcgtctgcacttctgcagtctaccggcctcgcttctaattgtccaggctctgtaattaatgcctcaggatagggcttcctttcttctctatgcagttacagccatacttattcctgcagtagggctggggaagtgtccaagggaggaaaatgcagcccctgactccagggaggtcattgtcaagtgcggaagatgacaggccaaaaacacatgatgcctgggagctacaaatcctggttgtagagtggggcactgaccaaaggtgccctctgctgggagagaggtaatggaagctgggctttgcaggatgtataggagtttgtgaggtggaaaagcattccaagaaaagggaacagcatatgcaaaggttcagatgttggaaagagctaagtgtttgagtgggtaaaacacagtaataaagtctggctggagtgtagaactgtaacaggggtaaatttagggagaaagaaggcatagaaagggctttgaacactacattgaggggctctgatcttatcttctgggaatctatgatgggatttaagcaggaagagagacttgatcatggaaaatttttttaaaaagaaacaatcaggccgggcacaggggctcaagcctgtaatcccagtactttgggaggctgagatgggcagattgcttgagcccaggagttttgacaccagcctgaacaacatggtgaaatcttgtctctacaaaaaatagaaaaattagccaggtgtggtggtgtacgtacacctgtggtcccacctactcaggaggctgaggtgggaggatcgcttgagcctgggaggcggaggttacagtgacctgtgatcttgccactttttgaaaccctgtctcaaaaaagaaagaaaaagaaagaaagaaggaaaggaaaggaaaggaagaaggaaggaaggaaggaaggaaagaaggaaagaaggaaaagaaaagaaagaagaaagaaagaaagaaggaaggaagaaagaaagaagaaagaaagaaagaaggaaggaagaaaaaaagaagaaagaaagaaagagaaaagaaaagaaagaaagaaaaattagctaggcgtggtggcacacacctgtagccccagctactctggaggctgaggtgggtggatcacctgagcctggggtggttgagactgaagtgagccgtgattgcaccactgcactacagcctaggtgacagagtgagaccctgtcttggaaaaggaagggaaggggaggggaggcgaggggaggggaggggaagcgaggggaggggaggggaggcgaggggaggggaggggaggggagatggggaggggaggggagtcggggaggggaggggaatcgggcaggggaggggaggcaaggggaggggaggggaagggaggggaagggagggaagggaagggaaaagagaaaggacaagggctcaccctggttgctgtaggaagggtaaattggaagaggagagaacagaggccatgagaccagggaggaggtgatccctgttgtctagagctgaatgtaaagtggactgaagggatcagaggccatgaaaatggaaaggagcggatggatgataggaatgggcagaatgtgggtactgaccattgatgggtgacaatgagggaggagaggcagctcacgcccaggtctttgagcaaatgagcctcattctagcaaatgttgtcttctgatttggagcacagaaaccagctcaggtttagggtcacaggtgtgagagccatccctaaaactgcaggaataaatgcgtctgcctagagaaagatacaacagggacctgtgagcaagaaaccaacatttgggccagcatgatggctcacacctataatcccagcactttgggggaggccgaggtgggtggatcacctgaggtcaggagttcgagaccagcctggccaacagggcagaaccccatctctgctaaaaatattaaaaattagccggatgtggtggcacgcacctgtaatcccagctactcaggaggctgagaatcacttgaacccaggaagtggaggttgcggtgagctgaaattgcgccactgcactccagcctgggtgacagagtcagactctgtctcaaaataaaaaaaaagaaaaaaaaaaagaaaccaacatttgttgtgacaagccaataagattcagaatgatttgttatgtggcattaacacagcgctcgctgactgctacaagtctccatcaactgatggagagttccccaaggccaggctccttttgacagatgagaaaatggaggccagggacatactcaacacttttcatcccgtctggaccagacccatctacacatctctgaaatctccagctaggcaggaatccggactcccatagctgctctgtgaattaagaaactcaaggggttccaataggttctgtggtaaattgcccatgaaagtaccagagaaaaccttgctcggaggggagaagatctgtgatgatatatctacaggaaggaaaaaaaaaaaaaaagatttgggagctcagcagcggaatgttctataagaaccttttaaaagcaaacacaggagacacgagcagtttttaaaatgacagacaatacgaaggaagataatatatttaaaacctatatcagttgttaacagaccataaaaatacagctacattaatctgagctgtctgtcatgggctctcagagcagctgtgtgattttatagtttcgctcctaccagttttcttgacagtttcacaaatacatctcaatttatttggataaggacaatagaaaaatattgctcctgttttttcattcattctttctttcttctccctcttcttcctctgccacgctccaaacagctgggagatcttacggggctggccgtaagggctggtggggagggggtctcttttatttttattttcattgttttatcccattgggagaaaagtttctgtgggggtttaccttccccactgagtctcaggcttgtggggaaatagccggattggcagcaattgctgctgtgtgtctgtggcccagtgtctcaccttctctgaggtttgttagcaaagagtctacacacacctgctcctgatttcagtttcttttttttttttttttttctttgagatggagttttgctcttgttgcccaggctggagtgcaatggtgtgatctcggctcactgcaacctccacctcctgggttcaagcgattcccctgcctc[213 bp omitted]gcctcatcgccaagttctgccctccttagtcatggcaaaatccataccctttagaatcctccatgtcccccctaccccaccctgtcttccctgccctcccccctctccatctccccattactcactctgctgcagccacacagacctccctgctgttcctccagcactccaggtacggtcctgcccaagggctttggcacgtgtggtgccctccatctgaaagtcctccagccatctccagggctgctttcttttctgtttctttcttcctttttttttttttttttgagatggagtctccctctgttgctcaggctggagtgcagtggtacgatctctgctcacagcaacctccgcctcctgggttcaagcgattctcctgcctcagcctcctgagtcgctgggattacaggtgcccatcaccacgcctgactaattttgtgtttgtatttttagtagagatggggtttcaccatgttggtcaggctgctctcaaactcctgacctcatgatccgcccaccgcggcctcccaaagtgctgggattacaggcatgagccaccgcacctggccctcctttctgtttcatctgtcagctcaaaagaccaccacctcctcaaagagccaccctgctgcaaccaccctgggctaacgaagcctcctgggtccctccattcatatcacatcatcttctgttgtctgtcccagcacttcactagttaaaaatagcttaggccaggcgtgggggctcacgcttataatctcagcgctttggaaggctggggtaggaggattgcttgagcccaggagttcaagaccagcctgggcaacatattgagacttcatctccacaaaaaattaaaaaattagccaggtgtagtggtacacacctgtagtcccagctactgaggaggctgaggtgggaggatcccttgagcccaggaggctgaggctgcagtgagccgtgattgcaccactgcactacagcctgggcgacagagcatgactctgtctcaaaaacagaaaagaaaagaggccaggtgtggtggctcacgcctgtaatctcagcactttgggaggccaaggtgggtggatcacttgagatgaggagtttgagacgagcctggccaacaggtgaaacctcatctctactaaaaatacaaaaattagccgggtgtggtggcgggcgcctgtaatcccaattactcaggacgctgaggcaggagactagcttgaatctgggaggcggaagttgcagtgagctgagatcacaccactacacttcagctctgggcaatagagcaagactctgttccaaaaaaaggaaaaagaaaataaattagcttattcatttgtctgaccctcacaccagactgagccctataaactcagaggttttttttttttttcttggcttcttgtgtttactggtacacagcaggtgctcaatacatgcttgtgaagggaagaattcaaggggaagtgaaagtgaacaggactctcctagcgaggggcatggctggggtaagggcttggaggtggggacttgtgatgggaacttgtgaactccaagcgtctgaagtgggagcccagccttctcccgttccatggtaagttttgagtttccacgtctcaccactcaagcatcacagatcccatctccagcaccgtgttggccactctgggaactgctgcctgtccccatgtggccccctccccgtgacagccttctggccagagaccacgggtgcctcctttgctccagccctgccttcctgcctctccagcggaggcatcccagacgatgctgctgccacagatgaaactcacttgatgctggggaaggcccggcacagatgtccccagaatggaacatctgggctgcatgttgctggcagctggtgggaaccaggacgctgtgaagtgcacccacatctctgggaggctgggtggccctgagccgcctcctggtcctgccatctgtctgcggccaaagattccctgatggtttctctgggttaaggacccagagaaaggacccagaactgactgtcatttctaatttctccatctccctccctccccacttccttccatcatcgagacctggggctgtcactcttaattataccctggatccaagcatattgctccagctcactcccactgccctgcccgagccagaccagcaccatcatttgcctgaactagtgcaatagcacctattggttaggtctcagctacttccctgacctggcctcctcttgctcttcctgcctcactaactctgttccagccacgctggtctctctgctgttgtttgaacatgccaggtatgcggaagcctcagaggcttcgcactggctgttccctctgcctagaatgatctgctccccagatctccccatggcttgctcctcctcatcctccaaatctctgttcaaatatcacctcctccaagaagcccgcctgatttcccttgcacattcaatctccatggcctctctgaccccaacttctccctctctgctccagctgcacgggcctccttgctgttccttcgacacaccagacacagtcctgtcccagggcctttgcctgggctgtgccctctgcccagaaccctcctctcttttgcctgggaaatttctgcttatcttcttagccccagctgcaatgtccatcccccagctcctctccccagactcccccagatcccaaggacctgggtgtgtctgtgtctggctgtgtctccacagcagcctggaaccccctaggggcccctttgtacacagctggtcacacaatggccatcttaaaccatttcctgacctgaattcacttttccttttcagatgtctctcagcctgagtttccttccagaatttccatgaaccagggggttggctgcagtgtctgtttgaaagatgtggctgggggtatgaagggactgccttgaagctgagttgacatggcaggctcaccttttcaacttggatggtcagtttccttggtgtggctttggggttcctgatgaaggttttaaaggggtcaaaagccccccaaaccatccccttggcagtgcccatctccccctctggctacccagggtctcatccctctctgggtatctccttcgtggtccctgtttcctgctcccatcccccagtgcagacgtcacttaagggggtattgaactacatggtcagaggcaaagacaagcctggtggctaacactgatcctggaaccacgtggcctgggttcaggtcccaggctgctgcttttgttcatagttcacgatcttgatctctctgggtctcagtttccctatctctaaaattgagataatggaggccagacacgctggctcacacccatgatcccagcacttcgggaggctgaggcaggagggtcacttgagcccaggagttcaagactagcctgggcaatatagtgagatccctatctctatgaaaaaaaacatttttttttaaattagctgggtgcggtgatacatgcctgtggtcccagctactcgggaggctgaggtgagaggatcgctgagtctagggggaagaggttgaggcagcagtgagctatgattgaaggactgcactccagcctgggcaacagagtgataccttgtctctaaaataaataaatacataaataaaatgggcataatggtaccttcctgttcactttatgttaaaggattaaatgagttcatacgtgtgtgtacctaaaacagggggttgcaaaccactgaattatcagctgctgctattcttactatttttaatttttccaatctcccagggctcaaccccagccacgctgtcctctgctcctgagtacagggtctcggcccctcagctcctactctgaagcagccacggctgctggaagaaggttctggaagaaaggggaggggctgcctggcggctgctctccgtgccacatttgcagagtgagccgaatgtatttacttagaacagaggtttttgttgtggactttggggagtttggcggggcgggggtgggggtggggagaggctgaaggtcctcccaccaagagagcccctctgacggactagagccgctccagcatcgccagggacgaaggaattaaaaatcaagaccccattccagacatgccacttcgcgttgggtggcggggaccttgaagaaacccctagaagtgaccccgggggtgacctttgcctgtagcctcgctcagccaatgaggaagcccactgtgggtgcttggaaaccgtttccatgacacccaggagccgccggtccctggaagggcctggtctgagggtgaggggctcggatcgggggcggggggcgagatgcttgctcagtaaccatggcaacgccagcagctgcgggaggcaggcccagctggcacggaggcgcctgcccctcttccctccccaccgtcccggctctccttctggcacaaacaggaaggctgagacccagggacacctgtcatccgctccaggttgccctcccggaatgagaactgcaccctatagagtgttaacactgggggctccggtggagcccggtgggggccgggtcttaggaagcaaagcaatggggccgggcgcgtggcggctcacacctgtaatcccagcgcttttggagaccaaggcgggaggatcgcttgaggcccggagttcaagaccagcctgggtaacatagtgagatcccatctctactaaaaatacaaaaaaaaaaaaaaaaaaaaaaaaaaaatttagccagtcgtggtatcaggcgcctgtaatcccagcttcttgagaggctgaggcataagaatcacttgaacccgggaggcggaggttgcggtgagctgagattgtgccactgcattccagcctgggacacagagcgagactctgtctcaaaagaaaaaaagaaagcaatggggccaggcctggtgcgtcacgcctgtcatcagagaggagggcggggggaggaagggaggaaggagaaaataaaaaagacaagacgagacaagaagaggtctggaagtcttgacagggaaaatctggagggcttcctgatggaggtgagcgtgtcccaagcttcctcagccagcaccagggtgagggtggccaccacatcagtgccccacctgttccaagatttatttaacattttcttcccaactgaatcatgtcctcgctagtgagtgtatttaaaaacagcagctctgcttccctgaaaatggagagccggttgcacctgccacaaacagaaggtgggtggtaaaactcacatgacagaaacaaaacgcagttatttcattctagtgaggtgtcgctgcctgcccgaggctgggagcctgcagcctgtgattgctttgcctaaaaagaggattcgcgagggctaggaaagggttaaactcccctgattacccagcagagaccctgtcctttaaatcatcagaaggaaggaaagaggactggaaaggggctggctgtctcaccctgccagctaatgctatttagaaacttgttgggggacgatgtgaaatcactctgggccctactagtgaggggaatcctgacctacagaataaggatttggttaggaggagaggaaaggggttccaggagtacagtataagcaaaggctaggaggaaggactgaagagaagacgtgctgctgggagagattttctctgatgttttccaacaagggaggtgttagggggaaagccgatgaacaatgaggtctgagtgagcggggacctgaggcaccatctggggctgtctgggaggaggaagtattatctgggaggtagaggaagaaggggagggaaagagcagcaagagaaggagccagtatgggggacattggtgagcaggtgactggcatgggcacccggaacttgatcctgctgggtactactgtatgaggcgtgattcagaggtgtcccagcagaggggcgagggagctggggtatttatcctccaacaccagccaatccttgtctgagggctgctcctaggggccagtccctggcacacatgggtccagtgcagtcctgaggacagagaatgccagtgggtagagggaagcaggtgctggcagctgggacccatctggggacatgggcagggtacctgtggcatctgcctcatccccttttacagacgcatccccaaggtcactcagcaatgtgaggatttgaacccaggcctgtgacatcaagttccctgctgtttccacatcaccacagtggctgaatctactcccttgagaagtgtctgaaaacgaaggattccaggctcagataagtttaggaaggtacctccttcctccccaaccttggagactcagatttgtatagtaaaggctctgacaagtcctgcagataaaggacacctgttgaacagtttcccaggtgagcagaaacataggctctttttttttccttcttttttgagacagggtctggctctgtcatccaggctggagtacagtggtgtgatcatggctcgctgcagcctccaccttctgggctcaagtgatcctcccatctcagcctcccaagtaactgggattacagggacgcaccaccatgaccggctaatttttgtattttttagtagagatggggtttcactctgttggcctggctggtctcaaactcctgacctcaagtgatcggcctgcctcggcctccctcccaaagtgctgggattacaggcatgagccaccatgcccagcctgggcccagtgtcttttctaccctcttcacagctagaatatagtgcctggcatgtgacagatgtcctgtgagctcaatttcctcaatggataaatgaatgaatgagtgagtgcagatcctcatacccaccttctggataaggaagctgaggcacggagaggttaagttgcctggatgaagagctgggctttagccacctgacaccccagaacgaaggtttttaatcctgatactgagctccccaagagagccagagcgtagggagtgagaaggggagtagcagtgaaggagttaactgctcccccactggattcatcaggccttgggtcactttgtgcccgaattcaagaattcacgtagagtttccctctcccctggctcaccccgcctccagggggaagcatattcgtttccatggcaaccatgttgtcggctgtccgactaggtctgagtgacagctactggggccagatgaagtcactcgccacccacactggagacagaggagccggcccagaagtgccaacaccagagacaggcttgaggggtttacctcgtttgccagcaaggcggggagctggtcagggcgggggaaaatctccctgctggccgacatcccaccatgataactccgtgccttggtgtcttaaagactctgctggctccagggcttccgagagagcttagatcttagctgtgtctgcctgagtaccctgaaggagagattgcatctgatctattttataacacccactcccagcactgaacctggtacacagtaggtgcctaataaatgcttaggacgcaagggagggaggaatggagggagggaggaagagatgatcagccaaagcactttaattcttacctaacactcaagttatcttccaacattccacttatcaggcaggcttctcttatcagttaaccttttagttatcagcctacactttagttgtcagctaacacctaagttatcagctaacactttacttatcagctaacacctcagctagcatctttgtcagaaaatttcaggacaagctgaaaaatggagaactgagcctcagaaagcaggattcttgctttcaaatccctcctcttcttcccgcctccaccccactgacccccacgaggcagaaggaactgattatggccaacacggaaggattggaggcagggaagggcaggttctgggatcagagagaattccaaagtgaaaaatgcatgctcaattcttaaggaaggatttttcaacacctgtggaactgtccaaagcctgaatggattgccctaagtggtagtgaggtccccatcacaggaggtaaccaagacaatctgtaaaaccatgccaggaaaatgatgcaggaattggagtagggggatcctgagactcctttctttctgactctatgattgggtggcagttctaagactctacacctgggattcagcagccattcacaagcttccacgatgccacaggtctacgccctcattctaagatctctcgattagtcctaggactgaccagttttgaaaacatttattgcccacatgctgtgagccaggccctcttctaggagctgggcaccaaaacataaaatgggccaggcacagtggctcatacctgtaattccagcactttgggaggccaaggtgggtggatcacttgaggtcaggagttcgagaccagcctgaccaacatggtgaaaccccgtccctactaaaaaataaaaattaaaaaatgcaaaaattagccaggcgtggtggcatgcatctgttatcccagctactcgggaggctgaggcaggaaaatcgcttgaacctgggaggcagaggctacagtgagccaagatggcaccattgcactccagcctgggtgacagaccaagactccatctcaaaataaaagaaacagttacaatgatgggttattccatccagtgccatgggcagagagcaagcagaggaggaggggctctgggagtgactacaggagaaggattctttttgtttttttttttttttttgagatggagtctcgctctgtcacccaggctagagtgcagcggcgcaatctcagctcactgccagctctgcctccccagttcatgccattctcctgcctc[134 bp omitted]ggcctcccaaagtgcagggattacaggcatgagccaccgctcctggccaggagactctataggtgatccagacacttgtgctgagacctgaagatgatggagccatgtaaccaaagggtgttcctggctgaggggaaatcgccagggcaaaaacccccgaggcaggaacatgctgggcatgcttacaaaacagcaaagaggccaggcctggtggtttatgcctgtaatcccagcactttgggaggccaaggcaggaggatcacttgaggccaggagtttgagaccagcatggtcaacatagtgagactctgtctcaacaacaacaacaaaaaaatttaggccaggcgtgatggctcatgcctataatcccagcactttgagaggctgaggtgcatggatcccctgaggtcaggagttcaggaccagcctggccaacatggtgaaacccaatctctactaaaaatacaaaaaaaaaaaaaaaaaattggcagggcgtggtggcgggtacctgtaatgccagctacttgggaggtggaggcatgaaaatcgtttgaacccgggaggcggaggttgcagtgagccaaaatcacaccactgcactccagcctggggaacagagtgagactctatctcaaataaataaataaatagatagatactttttttttttaaattagccagacctggtagtgcactccaaggctgatgtgggaggatcacttgagcccaggaagtcgaggctgcagtgagctatgatcacgccactgtactccagcctgggtgacagagcgagaccctgtctcaaaaaacaagacaaaaacaaaaacagcaaggagacagtagagggggattggagggtgtgactgaggaggggccatctgagttgagaaggagccagaagtgcaaagcgccaggagtttccaagcagagaggacagcacgtaccaaggaccagtggtgggaatgagcttggagacacggacacacagaatcagagacagaccgaaacaaagagacagagacaggcgctcagggacaccctaacagagacagacagacaaagagacaagggtctctcattggccggcattatgggttacatcgtctctcccccaaaaaacctatatgctgaagtcctcacccctcagaacctccgaatgtactggaggtggtacagatgtaactggagtagggtgggctctaatctaatacgactgatgaccttataaaaggggacaatgtggttcatgcctgtaatcccagcactttgggaggctgaggcgggggggatcacttgaggtcaggagttcgagaccagcctggccaacatggcaaaaccctgtctctactaaaaatagaaaaattagctgggtgtggtcgtgggcgcctgtaatccaagctactccagaggctgaggcaggagaatcccttgaacctgggaggcggaggttgcagtgagctgaaatcgtgccattgctctccagcctgggcaacagagtgagaagattccttctcaaaacaaacaaaaaaacgaaggggcagggggacaatgtgggcacaggtatgcgtgcagggagaatgctgtgtgaatatgaagttgccatctacaaaccaaggagaaaggcctgggacagacccctcccttacatccctcaagaagcagcagccggccaggcatggtggctcctgcctgtgatcccagtgcttttcagaggctgagatgggaggatgcttgaggccacgagctcaagaccagcctgggcaacagaatgagacctcgtctctattaaaagtaaaaaaaaaaaaaaaaaaaaaaaatacccaagtgtggtggcacaggcttgtggtcccagctactcaggaaggtgaggtggaggatcacttgagcccacgaggtcgaggctgcagtgagctgtgattgcatcattgcactccagcctgggtgacagagcaagaccttgtctcagaaaactgaaagaaagggaaggaaggaaggaaggaagggagggacgaagggaaggagggagggagggaaggaggaaggaaggaggaagagaggcagggaggaagggaaggaaggagggcaggaagaaggaagagagggttgggaggagggaagaaggaagaggggggagggaggcaggggggaaggagggaaggaaggaaggaaagaaggaaggaaggaaagaagggagggaggaaaggaaggaggaagagaagggagggaggaaagaaggaaggaaggaaggaaaaaagaaccagccctgctggcaacttggtttcagacttctagcctccaggactgtgacatatttctgttttttgttggtttttttgttgttgttgtttgtttttttgagatggagtctcgctctgtggcccaggctggagtgcagtggcgtgatctcggctcactgcaagctccgcctcccgggttcacaccattctcctgcctcagcctcccgagtagctgggactacagacgcccgccaccacgcccggctaatttttttgtatttttagtagagacggagtttcaccgcgttagccaggatggtcttgatctcctgacctcatgatccacccgcctcagcctcccaaagttctgggattacaggcgtgagccaccgtgcccagccgacacatttctgttatttaagccaccagttcgtggtcacaggaaactcacacatcaggtaagccagtgaattaacaaatgactgcactgtgggagtcagaacagttttgcaaagctccatgtcaactcaggccaacctcacctctaaatgggggaacagaatgcagggaatcccccagttcagaggcccaaaccttgcacttgtttctccagaaggagaaagagctggagattgctcactaagctgagaacttttctatgtcccattgcacagcatcctccccacgaccgtgcaaagtaggaactcactatcccttttacagttgaagagactgaggctcagagtgggcactgtattgggcagcttacgaagatgtcctcatttgatcccacttctggtactcctgcccttgtggaatctcttctccttcttataaaggataaaatacagttgggcgtggtggcttgcacctgtaattatggcttattgggaggctgaggtaggaggatctcatgagcccatgaatttgaggctgcagtgagctatgataccatcattgcactccagcctgggtgacagagcaaaatcacatctctttttttttttttttttttttgagacagggtctcactttgtcacccatgctagagtgcagtggcatgatcacggctcactgcagcctcagttcccaggctcaggtgatcctcctacctcagcctcctgagtagctaggactatatgcatgtgtcactatgctcagctaatttgtttaaaaaattttttttgtagagatggtggagggagggtctcaccctatttcccaggctggtctcaaactcccggcctcaagtgatcctcctgccttggcctcccaaggtgctggtattacaggcatgagccactgtgcccagcctcttgctagctttgatgaagcaggctgatgtggtcaggaggcccacatggcgagaacctgggtagcctccgccatcaaggaactaagtattgctgacaaccatgtgaatgtggaagcaaatcctaccccgttgagccttcagatgagactctattgctggccaacacctcgtgacagcctgaagtacaggacccagtcaagctatacccagattcctgatctgcagaaactgagatcataagtgagtgttgttttaagccactaagttttggggtagttttttacacagcaatagctaaccaatacaaacaatcagttgcctgaggtcacgcaacaaaaattaacagagtcaggctggttgccgtggctcaggcctgtaatcccagcactttgggaggccaaggtaggcagatcacctgaagtcaggagtttgagaccagcctggccaacatgggaaaaccctgtctctactaaaaatacaaaaattagccaggcttggtggcacatgcctgtagtgccagctactcaggaggctgaggcaggagaatcacttgaacctaggaggtggaggttgcagggagccaagatcacatcactgcactccaacctggatgacagagtaagactctgtctcaaaaaagaaagaaagaaagaaagaacgaaaaagagaaagaaaagaaagaaagaggaaaagaaaaggaagaagggagggagggagagagagagagagaagagcgcaaccaagagagagcgcaaccattctccctcacagggaagactgctggctgcggcaaaggatgagtgagaaggccaaaccctggggtttcctttcctctcctggcaccagggctgtgtcgctgtccgtggtactgaacggtgctggtaggagcggcttaagggagggtggagcatctcctgttccctgctagcagctccttggtagggagcctgcactgtccacatgcagggctgcgaaattcggggctttcaggaacttgcatggttctttcacagaaccacctccctggctccgagcttggtgacttctgctagcttgagcctctccttctggggaggctggcctcccaaatcccacctggccccaaaccctacctacccacgtgagaattcaggggatcctgggttgttggggtaacagacccaatcagttctctgtctctctgtctccttgtctctgtctttgcaactgtctttgtctctgcctctctctctattctctttctgattttttatttttctctgtggctttctttctctgcccatctctgtgtcttcctatctctgtgtgtatctgtctccctgtctctatctctgtcttgtctctctgtctttattcctgtctttgtctctctgtctctgtgtctctttgtttctgcctgtctctctattctttctttttgtctctgtgtctctgcccacctctgtctctctgtctctatctctgtctttgtctctgcccatctctctattctctttctatttgtctctgtctgtgtctctctccacctctgtacctctctgtctctgtccgcctgtctttctatgtctctttccgtctctctgtgtgtgtctctgtctcttcctctctttctggctttgtgtctctgcatttctttccagttctctctcttgctctccaccactctaaaagccacaaacccttctggctgacctgcaatgggcccaactttctccagccacctgaggagagggaaaatgaagcaaagaccccagccactcacccagcctgcattcaccacttataagcgacagggttttggggcataaacggcccttgaggctaactcctgccccagtccgcctctgcctcccatcatcccttgtcaccatctacacagtgacatgattgataggagatctttcactgcctctgattcccaagggccgctccccgctccacacctaaaaacaaacctcattagcccccaaacacctggaagcagggaacatgaggggtgtgaataatttattttgtgagtcattttaatattttataataattgcgaggagtcatttggtattgtgtagctgtttgagtgtcattaagacagagccaaggctgggcgcggtggctcatgcctgtaatcccaacactttgggaggccgaggtgggtgcatcacttgaggttaggagatccagaccagcctggctaacatggtgaaatcttgtctctactaaaaacacaaaaaattagccgggtgtggtggcatgtgcctgtagtcccagctattcgggagactgaggcaagagaatcgcttgaacccgggaggcggaggttgcagtgacctgagatcatgccactgcactccagcctgggtgacagagcaagactccatctcaaaaaaaaaaaaaaaaaaaaaaagaggaagggatgggccctgccaccagggtatcttggaatctatcgaggtgagccatctccaagggggcatgtggctgggggccaggctgaaggaagaaggcagcctcaaagcatattgagggtggccggatgccacttagtaatcggtgagcagtgaatgggccaagactgcagctctgtcttagtcctgtttcattcactcattcattcattcatgcactcattcaaactctcccccggggtcctttattacacttgaatcaagctcaaaccctccaccgtggcctaaaagacccccccaggctgggtgcagtgactcatgcctgtaatcccaacactttggaaggctgagatgggaggatcgcttgagcccaggaattcgagaccagcctgagaaacatagcaagacccctgtctctacaaaaactacaaaaattagctgggcgtggtggtgcatgcctgaagtttcagctacctgggaggctgaggtgaaaggatcacttgagcctgggagatcaaggctgcagtgagccatgatttgcaccactgtactccagcctgggcgacacagcaagacctcatctctaaaaataaataaataaataaataaataaataaataaataaataaataaataaataaaattataaaaagaataaaagggccgagcgtgttggttgatgcctgtaatcccagaactctgggagaccaaggcaggtggatcacttgagcccaggagttcaagaccagctaagcaacatggtgaaccccacctctatctaaaatacaagaaattagccaggcgtggtggcacgtgcctgtcattccagctactcgggaggctgaggtgggaggatcgcttgagactgggagatggaggctgcagtgagctatgatcacactgctgcactccagcctgggtggcagagcaagaccccatctctaaaaacaaataaaattataaaaaataaaagaccccctttcccttcaaaatccagccccttaagccttcatctcctctcctgcgccccattctgctccagccacactggcctccttgccactcctccaatgcacaagcaacttcccacccctgagcctttgcatttgcagccccctcctcctagcatgccctgccctggactcctcccgtgatgagctccttctcatccttcaagcctcagctcacacatcgcctcccggatctcacagtggtaggatttagagagggggcgtggggtaggagggtgtgcttggcagggagctccgtgtgggcaaggacttggtgccaagacggttgagactgaatcagctgaatatgaagatgggcaggtggagaggtgggtggggctgggaaaaccgggttgagggaaaagatgcctggaagaagaaggagaaaaaaaaaaaaaaaaaggctaggggctgggttccagagagcctcaaagatgaggatgaataatctgggctccatcccggaagaaaggacttgagaactattccttatttcttcatggagctgggtcacgctccaccttcactgctcattcctccgcatggtggattccgcattgtctcaagtccctccatgctcatgagcccaattctagccagtcacttgggccatttcttccctctagagaacctcattatgacccacactgatgtggcagaaaacgtctggcatccattaaaaaaatccatgcctcacttcccacaacgtagagttaccctgggaagtggctgcccacccatggactacatttcccagatgcccttgcattaggtatgatcatgtgacatgttctgaccaatgggatgtgggtggaaaggataagtattattcccaagtcaaatacgtcttagttccccacaaattaccataaatgtagtgacttaaaacaacgcaaaattattatcctagagttctggagatcagaattctaaaatgtggaaggttgtgtttgctctgaagactctaggggagaagctgttccctggtcttttccaggttctaggggctgaccacatttctaggttcacagtctcacatccctctgacctctgcttctggctttgctctttgatgctcctgctttcctcttataagggcccctgtgatgacgttggattcacctggaatctccaagaaaatctccccatctcaaggtctataatttaatcacacctgcaaaatctcttttgccatataaggtaataaattcacagttgtgagagttctttatgtattctaggtacctgttccttattagatgtatgatttacaaatattttcttccatcctctgggttgtctattcactgtctggatggtgtcctttgaaacacagcattttaaaattttgatgaagtcctatttatctggtatttctttggttgtttgcgctcttagtgtcatgtctaagaaactattgccagtcccaagatcatgaaacccctttgtttttttttccaagagttttattgttttaactcttacatttaagtctatgatgtattttgagttaagttttgtgcttggtgtgaggtagggattcaactttacccttttgcatgtggatatccagttgtcctgaaatcatttgttgaaaagattatttgtttctccattggattgtcttggcccttgttgaaaagcaattgaccataaatgtcagagtttatttctggattttcaattttctaccgtggatctaaaagtctatcattgcgccagtaccccattgttctgcctcccaggttcacgccattctcctgcctcaccctcccaagtagctgggactacaggcgcccaccaccacacccagctaattttttgtatttttagtaaagacggggtttcaccatgttagccaggatggtctggatctcctgacctcgtgatccacccacctcagcctcccaaagtgctgggattataggcgtgagccactgtgcctggttgatataaggtttctaatcagaaagtgtaagtccttcaacttcattatttcatttcaagatgattttggatactctaagtgccttgaatttccatataaattttagaatgatcaatttctaaaaaaaaagctgagattttaatagggattgttttgaatctacagatcggttaaggagtattaacaatattacattttctaatccatgaatatgagaggtttttatttaggtcttaaatttctttcaacaatattttatagtgctcagagtataaattttgcacttttctgttaaatttactcctaagtattttgttctttttgatgctatcataaagataatgattttcctaatttcactttcagattgttcatttctaatatatacaaatgcaattaactttgttttctccttttttttaattttatttttccaaatttttacacttaaaaaaaaaattgattcttggcctgggaagtcgaggctgcagtgagctatgatcacatgattgcactccagcctgggcaacagatagagactctgtctccaaaaaataacataacataacataacataacataacataacataacataacataacataacataacataaaatagttcagcaaagttgaaggatacaagaccacgacacaaaatttgttgcatttgcttgctcag[142 bp omitted]aaaccccatctctactaaaaatacaaaaatttgcttcctgggttcaagtgattctcctgcctcagcctcccaagtagctggtactacaggtgggcaccatcatgcccggctaatttttgtattttgagtagagacggggtttcgtcatgttagccaggctgttcttgacctcctaacctcaagtgatccacccatctcggcctcccaaagcgctggga[144 bp omitted]cccgagtagctgggaatacaggcgcctgccaacacgcccggctaattttttgtatttttagtagagagcgggtttcactgtgttagccaggacgatctcgatcccctgacctcgtgatccacccacctcggcctcccaaagtgctggaattacaggcgtgagccaccgcgcccggccgtgcctggccttttttatgtttttatttgaaatccgtatatcctctttggcgaagtgttgttcaagtcatctgcctgttttttggtgtttttttttttttttcctcttctgtttcgagacagagtctcactctgtcacccctggagtgcagtggtgtgaggacagctcactgtaacctcaacgtcttgcgctcaagcaattctcccacctcagcttccccagtagctggaacggcagacacgccccactacgcccagctaattttttttttaagaggtcaggtttcactattttgccctggtttgtcttgaactcctgacctcaagcgatcctcccatctcggcctcccaagtagctgggacttgaggcgttcaccaccacacccagctaattgattaattttttgtagagatggagtcttcctaggttcccctagatggtcttgaactcctggcctcaagcaatcctcccatctcggccttacaaaatgttgagatcacagctgtgagccactgcaccagatcactttttaactttttatttatagaaaaatgtacaatatgcagttgtaaaaataatacagaaaaacatggcagtaaatcggggtttttctgttttttgtttgtttgtttgtttgtttgtttgttttgagatggagtttcgctcttgttgcccaggctggagtataatggcacgatctcggctcactgcaacctctgcctcccggattcaagcgattctcctgcctcagcctcctgagtagctgggattacaggtgcttgccaccacgcctggctaattttgtatttttagtagagacgggtgtttctccatgttggtcaggctggtctcgaactcccgacctcaggtgatccgcctgtctcggcctcccaaagtgctggaattataggcatgagccaccatgcccagctggcagtaaatcttaatgactttgaattaggcaattatatgataccaaaagcagtaataaaagaaaaaacagattgattggatgacatcaaaattaaaaacgtttgtgttgccaactgataccatcgaaaaagtaaaagtacaatctataaattggggaaaataaacttgtatgcaaatgtgaaaagaactctcaaaactcaaaaataaaaagattaataacccaatttttttttttaacggattctcactctgtcgcctaggctggaaggctggagggcagtggtgcgatcttagctcactgcaacctccctctcctaggttcaagcgattctcctgccccagcctcccgagtaactgggactacaggtgcctgccaccacacccagctaacttttgtatttctagtagagacggggtttcaccattttggccaggctggtgtcaaacttccggcctcaagtgatctgcccacctcagcctcccaaaatgctggaattacagacgtgagccaccacgccaagcctaataacccaatttttgaaatgggcaagtgatctcagtaaacgtttctccaaagacaatatacaaatggccaatggtcacatgaaaagatgctcaacttcattagtcactaggaaaatgcaaatcaaaaccacaatgagataccacttt[138 bp omitted]atggcgaaaccctgtctccaccaaaaacacagaaattagccgggcatggtggtgcacacctgtaatcccaactactcgggaggctgaggcaggagaatcacttgaacccaggaggcggaggttgcagtgagccgagattgtgccacttcactccagcctgggcaacagagtgagactccgtctcaaaaaaaaaagttaaaataaaaaaatatgtgtatgcaaatctttttttcttttctttttgagacagagtcttgctctgtcacccaggctagagtggagtgatgtgatatcagttccaccatgaccagctaattttttgtatttttagtagaggcagggtttcactgtgttggccaggttggttttgaactccagacctcaagtgatcctcctgcttctgcctcccaaagtgctgtgattataggcgtcagccaccacgcctgaccccatgcaaaatcttaaggataaatgttgatagcagtattattgataacaattcaaaaagtgaaaacaatctgactctccatcaactgatgaacagaaaagccaaacgtggtccgtccacacaatggaatgtgtttggccatgaaaaggaatgaagccctggtataggttacaacgtgggtgaaccttaaacacatcatgctctgtgaaagaaaccagacacaggccaggcacggtggctcacgcctggaatcccagcactttggaaggccgaggtgggtggatcaagaggtcaggagttcaagaccagcctggccaagatggtgaaacccccatctctactaaaaatacaaaaattagccgggcgtggtggcaggtgcctgtaatcccagctactcgggaggctgaggcaggaaaatcgcttgaacccggggggtggaggctgcagtgagccgagatcgtgccactgcactccagcctgggcagagcaagactctgtcttaaaaaaaaaaagaaaagaaaaagaaagaaaagaaagaaagaaaccagacacaaaggccacatattgtatgatcttgctcatatggaatttccagaacgggcaaatccagacacagaaagtggacttgtgagtcgtggtggccaggggctggggaagagattgggagtgattactaatttggtttcttttttgtttgtttgttttgttttgtttgtttgttttgagacagaatctcactgtgtcgcccaggctagagtgctgtgacatgatctctgctcactgtaacctccgcttcctgggttcaagcaattgtcctgcctcagcctccaaagtagctgggattaaagaacccgccaccatgcctggctaattttgtatttttagtagacacggggttttgccaatgttggccaggctggtcttgaactcctgacctcaggtgatctacctgcctcgtcctcctaaagtgctgtgattacaggcgtgagccaccgcgtccagcctaattggtttatttctttcccttccttccttccttccttccttccttccttccttccttccttccttcctttctttcctttcttttccttctttctttcttctttcttttttacagagtctcgctctgtcatccaggctggagtgcagtgacgcgatctcggctcacggcaacatccgcctcccaggttcaagtgattctcctgcctcagcctcccgaatagctgggacttcaggtgcgtgccaccacacccagctaatttttatatttttactaaagacagggtttcaccatgttggccaggatggtctcgatctcttgacctcatgatctgcccaccttggcctcccaaactgctgggattacaggcgtgagccactgtgcccggccctaattggtttcttttagggtgactaaaatattctaggtcgggcatgatagctcatgcctgtaattccagcactttgggcggccaacgtgggaagatcacttggggtcaagagttcgagactagactagccaacatggtgaaaccctgtttcactaaaaatacaaaaattagccgggcgtggtggcgcgcgcctgtagttacagccactcgggaggctgaatcgagagaatcacttgaacccgggaggcagaggttgcagtgagccaagatcatgccactgcactccagcctgggtgacaagagtgaggctctgtctcaataaagtataacatagaacattctaagattatattgtaaagatggttgcacatcatctcagctctgtgaatttactaaaaaccactgaattatatacttcaaatgggtgacttgtatgatatgggaattatttcaataaagatgtttttaaaaaaagtaaaaaatgagtacagagagatctcttgtgcctttaaccagcttcccccaatggtgacatcttacaatatcataaacgggaaatgaacattaacataatccatcaaccttattcagactttgctggtttatgtgcactcatttgtgtgtgtgtgtgtgtgtgtgtgtgtgtgtgtgtgtgtgtccatgcaacatttagatgtgtagtttcacaatcaggacacacaacacattccattatgaggatgttctgtgctgcacttttttttacgtcacaaccatctctctcttcctcctacctgaaaacccttaccattcttcatcttataattctgtcatttcaggaagcctgtatcagtggaaccgcatgctctgtaaccttcagcttttgttgttgttgttatgtatttctttttaattacgtgggtacatcgtggtgtatatatatttatggggtacatgagctattttggtgcaggcatgcaacgtgtaataatcacatcatgaaaaactgggcattcatcccctgaagcatttatctttcatgttaggagcaatccaattatacctttatagttattttattttgttttatttaattttattttgagatggagtctcactctgttgtccaggctggagtgcagtggcacaatctggggtcactgaaacctcctccttccagcttcacacaattctcctgcctcagcctcccaagtagctgggattacaggcacctgccaccacgtccagcttatttttgtatttttagaagagacagggtttcgccatgtcatccatgctgctcttgagctcctgggctcaagcgatcctcccacctctgcgtcccaaagtgctgggattacaggtgggagccaccccgcctggcctctttttgtcattttaaaatgtacaattaagttattattgactggctgggcacggtggctcaagcgtgtaatcccaacactttgggaagctgaggtgggaggatcacttgagcccaggagttcaagaccagcctggatgacatggcaaaaccccttctctaccaaaataactacaaaaattagccaggtttggtggtgcatgcctgtagtctcagctactcgggaggctgaggtggaaggatcacttgagcctgggagacagaggttgcaatgaatggagatcacgccactgcattccagcctggacaacagagtgagatcctgtctcaaaaaaatacatatattattgactatagtccccgcgttgtgctatcttactaggtctcttactcattcatcctttttttcttttttggacctatgaaccatccgttggacctcaccactccactcctctataacctttgaagactggctcttgtcatttcagcacagctcccgtgagagccaacctaagttgctgcgtttctcaatagttccttcctgttcattgctaagtagaattccacggtctggatggagcacaatttgtttaaccgttcacctgttgagggccatttaggttgcttccagcatttggccattttagaaggaagctgctctgaacattcacttctgggtttttttgtttgttttttgttttttgagacagagtctccctctgtcacccaggctggagtgcagtgatgtgatctcagctcactgcaacctccgcctcccaggttcaagcaatcctctgcctc[222 bp omitted]cctgggatataaatgcccaagaatgtaattccagggtcatatggtaagtgcatggtttgttttgtacaacaaaacaaaacacagtacagcaaacagaacaaaacgaaatcctgccacactctttttccacagtggctataccatttcacatctctgccagcaacataggactgagtgatctatttggtcttcatccttgccagcatttgatgtgatcaacttttttttttttaatttagccattttgatgggtatgtagtgatacctcattgtggtttggatttgcaggtccctggtggctaataactttgaacattctttcatgtacccatttgccatctgtatctcctcttcagtgaaatgtcagtttccgtctatgtccatattttaattgggttgtttgttggtttttgttttttttttctggagatggagtctcgctctgttgcccagactggagtgcagtggtgctatctcagctcactgcaacctctgcc[134 bp omitted]gctatgtgatttgcaagtagactcttccaaaccatagcttgtcttttcaccctctctaacggtatagtcttttgcatagagcagaaatcattaatttggatgaagtccaattcatcagtttcttcctttatggctcattcttgggtgtcatccctaagaactctttgcttaacctcatgtcttaaagattttattttgttttgttttaaggagcagagagttcaataggcaagaaggaagaggaaagaaggaagcagctccctatagagacacagcaggaggggaggctccaaagccaagagaggagaccctattgaagatttttttctcatgttttcttctacattttacatgtagacctgtgtgatccctttttttttttttttttttttttttttttgagaccgagtctcgctctgtctcccaggctggagtgcggtggtgtgatctcagctcactgcaacctccgcctcccgggttcaagcgattttcctgcctcagcctcctgagtagctgggattacaggcatgcatcaccacgcctggctaatttttgtacttttagtagagatgggttttcaccatgctggccaggctggtcttgaattcctgacctcaagtgattcacccacctcggcctcccgaagtgctgggattacaggcctgagccaccgtgcctggcccctgtgatccgttttgaattccattctgaatgtaaaaaatagcagaagcgggtttgattcgggggaccctagggagccaatgagggttcttgagtgagagaagatacagttggcaagaagaatcaggtgagtagactcaagtagcccatgacagcctcgctctcagcctcagtctccccccaccggcaaactaacgagaccagaagatctctaaagtccgctgtcatcaaatgaggccacctccctggacgtttgtccccatattccctgcgcctctggagcagactcaggtcaaaccccagcgcctgcacaacgtgtgtgagcctctgtgtcccagtgctttgatcttaagagtgactcagtgggacagcgccgagagctcactcgaccccaaaaaactgtggctcttttttctctcagacggcaaaatcaggtcatatttcaattccagtcattctccttcatatataaaatgtgccaagaaccactttcccgaaaatctaaattgaaagtaaatagcacgggggacaattctcggtgataaaactgcggattctggagcttcttgggataatatttattctcccttcttgctaatggctccagctgcctccccaggttattaaagtaatgcgtttgcttaacctgactggggccgcatcccaccctgggctgattgggccccgcgtgaagccccccgccacccccctccaccggacaattatattaacggctgctggtttgcaattactataaatcagaaagcgcgtcggcctgggtttgtttttctttattgaaaatgtttaaacctcatgcattgcaaatatcaccgcctcagaccgggatttaactctttccttgagacttggaggtacagctctggagggctttgctggggatagtgctaggataatccctgctttctgagatgaggaaattgaggctcagagaaggaatgccatttgcctggggtcacacagctggtgggtcactgcactgaaacggcactgagttttttgtttgtttttttcatgcctgatgaagttacattctttgtggcaaatatttaaaaatgttgagatctgttatctcagcaaaaaccacccccagttctgcgggggtgggtgggtgtgtgggtgggatatatccttccagagatttttttttctatgcatatatattctggcatgcaccaaatgaatgcaggtttaatgaattatgccttccataagcaccgaggtgtttattgagcacctactgtgtgctgggtgctgttttatgtgctggggatacaggaagcaaaacaggcttatctgccggtagtttcaagcataggggacagccagggcaaggaccctgaggctggctcttgcctggcacacaaaggggcgaataagcacaggcgtggagagtgcaaggggcaaaggcagggagggtgaaaagagcattccgtgtggaatcagagggagaggagagggcttcatggagctctccaaggtagagtgctgaggtttgctgaggatgtgggtgggaggaagaggaggcagggagaccccaagattccctctgagcagctacaagggctgacctcagctgagatggggagatgcaagaagagcagtttagggggtccggtgcagcccgacatggctgtgttgagtgtgaaatgcccatcaaggccaagtttggagctggcggaggcccagactggagacaggactgtgggtatcagtgggtgtagatgggtttagagccccgagagttaatgaggccgacctggaagggtgtggatagaggagcaaagaggcctgagaacccagcccttgaccagcaatggacagagagagggacagaagagggacccagagaggtagaaggaaaggccagtgtttccaggaggggcggggcaccagccggtcagacgccgtccagagggacgaggaataggatggggcgggtcaacgctgacttctgtcagaggcgtttgaaccaggacaactccatcttggatagggactgggtaaaataaggctgagacctactgggctgcattcccagacagttaggcattctaagtcacaggacgagatagcaggtcggcacaaggtacaggtcataaagaccttgctgataaaacagcttgcagtaaagaagccggctaaaacccaccaaaaccaagatggcgacaagagtgacctctggtcttcctcactgctacactcccatcagcaccatgacagtttacagatgccacggcaacgccagaaatttaccctctatggtctaaaaaggcgaggcatgaataatccaccccttgtttagcatatcatcaagaaagaaccataaaaatgggcaaccagcagccctcagggctgctctgactatggagtagccattcttttattcctttactttcttaataaacttgctttcactttatggattcaccttgaattctttcttgtgcgagatccaagaaccctcccttgggacctggatcaggaccccttcgggtaacactttgacaagggcagcttcagtggcggaaggtgtgagaggccaggctgatgggtggagaaggctcaggagaaagaaagagaacagaagtgcagacagtgagtgtagacaactcaatctccaggagtttggccataaaaagaggcaaggaggtcgggcgtggtggctcacacctgtaatctcagcactttgggaggccaaggtgggtggatcacctgaggtcaggagttcaagaccagcctgaccaacatggtgaaaccccgcctctacttaaaaatacaaaaattagctgggcatggtggtgtgcgcctgtaagcccagctactcgggaggctgaggcaggggaattgcttgaaccaggaggcagagtttgcagtgacccaagatcacgccactgcactccaacctggacaacagagcaagactccatctcaaaaaacaaacaaagaggcaaggatatggttggtcaccggagggggatgtggaagtttactttttccctataagatgggacctgcccagcagagccagaagatgttaccgaagagaaagggccaagtgctgaagccaaatccttgggtggggacacagagcctgtgtttatcctgcctctattgcctactctgtaaaacaggcataagaacagtatccaggccgagtgtggtggctcacaccggtaatctcagcgctttgggaggctgaggcgggcagatcgcctgaggtcaggagttcgagaccagcctggccaacatggcgaaaacccgtctctactaaaaatacaaaaactagctgggtgtggtggtgggcacctgtaatcccagctacttgggaggctgagataggagaatcacttgaacccgggaggtggaggttgcagtgagccgagaccgtgcctttgtactccagcctgggtaaaaagaccgaaactccatctcaaaaaaaaaaaaaagaacagtatccatcacccaggcatgatctaggcacccagcaaaagtccaggctgatgacatgtctctctcccctgtggtgtgtctatgaaggggtcaccccctgctccagtttgtggcagaatgcagtttccctcctgacacccacccccaagggagatagacagtctccaggaaaaactcagtgagttccccctttgagaaagggccccacaagtcaaagtgctttttcaaaaataaatagcctgattagcataaggtatgcaaatgtatgctaatgtgacaactattaaaagatttcaaatgtcatcgagggaaaacacaccgggcctggctggaggggtgggggacgggaggagaggatgcagccaggactcttgagaaaggtcgaggggctcaaccgcaagatcaccaggatacacactcgtacagacacacacaaactcacactcacacccgggtcattccagggtggccttaagtcctctcctgggcagaatccccaaagctctgtctccaggtgtgagtattaagctcctggaaaccctcctccaaatctttcccccaacacactctaagtgcctgaaaaactgtccagggtgacaatgcgtctcattccaccaagagcacacagatttgttctgcaaataatctctgggaaaagcagtaacagcatgggtgacagaccccagagcctttcctgagaataggttaaaacggtagtctcatccatgacaaaaaaaaaaaaaaaaaaactcctaagaactggtaagagatggctcctatccataataaatcctccctcacttcaggggaaaattttcatccatatccactttgttttctgaggctgacagacaaaaatcagacccagaatggggagagacttttcccagggtcacacagctgtgtgtgtgaccaaaactatcaccaaactaatcaccaaaactatttggtgtgttgttgttgtttagagacagggtcttgctccattgcccaggctgcagtgcgatgctgctatcacaactcactgcggcctgaaacttcttggctcaagcaatcttctttgcgaggatctggcctgcagaccccagcttgcacgatggatgaataatgtacccagacactgatattcagtgaaagagcagctacgggtcgagccactcacagacaccacggaaggtgctgtaaagagtcagcagccacagtcccgactagctggccctgagggcatttatttagcacagttttgtttgtttgtttgtttgtttgtttgtttgagacggagtctcgctctgtcgctcaggctggagtgcagtggtgtgatctcggctcactgcaagctccacctcccaggttcacgccattctcctgcctcagcctcccgagtagctgggactacaggcgcccgccaccacgcctggctaatttttttatttttgtatttttaatagagacggggtttcaccatgttagccaggatggtcttgatctcctgacctcatgatccatccgcctcggcctcccaaagtgctgagattacaggtgtaagccaccacgcccccggcctgagcacagttttaacgacaaaggctttgagtcaacacacctgtgggtaattaatctggttgctcccaccccgggagagccatcttacccatgagtgatcagttagttttaggactgagtaaacaagcgcgttagacaaactcctctacattcctacgcatctacgccctgagcttttaagagaactcagctgccttcagccaagacttttgctaaagctatgcaaacctctcggccttccaagaaggtctgtgtttatttcctctaaaatcttttcctccaccctgactgaacccccacacctcttgcctcagcctcccgagtagctgagacttacagacatgtgccaccacacccaggctcattatttttatttttggagagatggggtcttgctatgctccacaggctagtttccaactcttggcctcaagtgatcctcccaccttagcgtcccaaagcactgggattacagacatgagacaccatgcctggccaccaaaactctttggtgagaccagaattattgaaatcattttcagatgagaaaactgaagatcagagatgtgaaatgatttgccccagctcacacagcaactgtgaggcaggtcaggtcagctgctcaaacttcagctgcccaaatttcaatccatcttacatcacctttctactacttctactattatttcctgaatatttttcttctaatggacccacttcttaaaaccttaaatgtatttagaaggaaattgtttatcatgactgtaaatgaaaagccagaatcactgaccataagtagaaactaacttaatgagaataaaatcatattattaatttctgacgaaagatagttgcctctgagctctgagctggagcctgatctctctctttgtccaaaaaggatatttcacgtgtccaagaaggtgttaaagactgattcacacccagttaagactttcttcttgcaaaagacatgcaaaggaagagctctctccctataagagtccgtggtgttaagactgtttcatgcatcacctaaaaccgtctcatggccaccaggctgggctctatctacctgaagggcaggaagactgtcccaataccttagagttctagaattatggccagggatctatttgggggctcatactatcagtgcccacggccatttcagtgcagcccaaagatggagaagagatggcttcactgataaacagactcacctgtccatccacctatccattcatccacctaccatccatccattgacccatcaatccacccacacatccatccatccacccacacatccatccatccacccactcaccacccctccacccactccacccacacatccatccatccactcatccatccatctgcccatccatccatccatccatccatccatccaccattcacccataacccatccaccattcatccacccaccatctgcccaaacatccatccaaccatccatccatccatccacccatccaccacccaatcatccatccatgcatctactatccacccaccacccatccatctacccatccattcacccaaacatccatccattcacccaaacatccatccacccacccatccatcttcccactcagccatccactcacctattcagtaaatatatatccagcaactactctatgccaggcattgttctagaatatggatacatagtggtgaccaagacatacgtggtcaccaaccccttgaggcttctgaaccagtgaggacactctccatccctcgagcaacaacatgaggcggattagagaatttttctccatttttttttgtgacaagggtcgtcttggtagatatttgtgggtattccctgaccttcattcttccctccacctgtaggacgcagaagcaacctggtttcgccgctgcctggctgctctccaaacccatttcctccttcttcagggcacatagcaaggtgtttcccagcattccttgcagttggggcagccatgtgacttaattgagccagtggaaggtgggcagaagtgatgtggccatgacttacgttctggcccaggctctttctgcaacctacactttaaagatggaggaggtacaagacagcggggcctgatccctgagttactaggtggaaacaaaggaacacctgtttgctctttatatgagcaacaaacttctgttgggtcattgaggcttgccagtttataatggcagggagtgttaccttaaccaatgcacacgtttcctcttttccaaccctgagagggaattggttccacctctggctccagccaatcactgaagcctattcctgctgacttcctgattagctcagcctggtcatgtgactgaaggacgcagatggcaatattggatgggtttctaggcatcatagcttggagggccactggggttgctggaaccaggacacagaactcgagaactgggcttctaacattcgccactgggaaagaaaaaaagaaatgtattatttattgttactattattttaatatcctgcaattgaaactggcctatttcctggatgatccaaatttaggaactttttcctgcagctttaatcatcctgaagatgccctgacttctgtctccacccagacttggccccagatctctctccagttcctcctggatgcctcctcttggaggtccagcaggtacatcctacccaactcccaatgcatcctttttatccccctccagcacctcctcctgtaaccccctccctgatggccccactctttttctggaaagttgtgaacaagcctctctatctccctttcttatcaacagccggccctgccaatttcacactcaccaagtcctattgatttcaacattactgtctccatggcagccccactctgtacccctatctgtgtttttcaatagacaccatcagctcctacaatagccttcttgatgggctcctagcatccacacagcagccaggaggatcgatcttaagtgtaagtctgacccttcccctctcccctctgtaactctccatggctccccagtgccctcaagagaaagtctaaactttattttcaaaattcttcatagtctagctacttcattcttccttgctccacccctgcttctccttgttcacctagcacctgctcatctttaaatgtcatccctcagggaagcttcacctgaccctgctctacaatgctgagaaaggagtcttcctgagctaccccagctgcctgagcttccctcatcacaggctgtaaatgcctggttatgtgtctttgaattcctagagggcaagggctggatctatttcaccactgtctccagccccccagcacagcatccagtgtgagcttaataaatatttctgaatgaatgaatggtgataagaaatcgaggctttgcgaatgctactgtgtgtagcagacgctgtgggcatccctactgcacccacatttcagcacctgccaacagcatccttctgcagtcacctgggtgagggccaggctggaagtgacagagaattgatgtctcaggaagcagcccttcaccagtgatggacaggcgctggtggataaatatcccacctctctcattctcttgggaagaacaagtgcatgctatacaccatctcccaagggtatccagtgggactgagcccagttgctcagggcagtcacctgctcataagtgttggttctttccttccttgtctcacttccccactctcctggggcttcctggatcacttcccacataaacaacttacccccaaatccttgtttcaggagctacttctggggtatccaacttaagacactgtagtgaaaatgagtctataatttactggctgccgcttccagggagaactttgatgtgtttgggaaaaaaagaaaaacaattgcctctttctccctgtcagctgtagtcctcacagcctccaagcaaagactgccacatttgcagttatgtattaattgcttttatttttttttttccccgagaacgggatgctctcctgcaatatgtgtgtgagagagagagtgtgtgtgtttaataactttctcatttgagatctggccggatagctttttgaagaaagtctacccagagcctggaacgtatagaaaattctcccggcttaatagcactcccacccgcccatccatcacagacgcactgtggaatgaaaaacgagcacattgattggatctatttctaatcgacagcctgagatactgtttgaggtctgccattagacggaagaagttggtgtggaagtggctgtgtctctatttctcaagggcacggggtctggcgtgggggttgagggggacagaaataatcatggtagcatttagcaagcatttattgagtacctactgtgtgccagatcctgcaatgggtgctggtcattgagatagacccagctccaccctcccagtgggggagatgtacaggtcacttgtggcccacaatcagaaccatgatgggggagattcaggcagctctgggggcccagagaaggtgtctgacccagcctgggagatcagggagggcttcctggaggcagggacagctgagctgaaagctgaggagtcaaccaaataagaaatagggaagaagttggctaccgtggctgatgcctgtaatcccaacactttgggaggccgaggcaggatgatccctcaagctcaggagtttgagaccagcctgggcaacatagcaagaccccatctctatttaaaaaagaaataggtgtagtggtgcacacctgtggtcccagctacttgggaggctgaggtgggagaattgcttgaggccaggaagtcgaggctgtagtaagctatgattgcaccactgcactccagcctgggtgacagagcaggtccctgtctctaaaacaaaccaacagggtgggcgcggtggctcacgcctgtcatcccagcaatttgggaggccaaggtgggaggatcacctgaggtcaggagtttgagaccagcctggccaacatggtgaaaccctgtctctattaaaaatacaaaaattagctaggcatgatggcgggtgcctataatcccaggtactcgggaggctgaggcatgagaagtgcttgaacctgggaagcagaggttgcagtgagctgagattgcaccattgcactgcagccctgggcaacagagcgagactctgcttctaaataaataaataaataaataaaacaaaacaaaacaaaacaaaacaaatggggaagagtgttttcagggaggaagaacagcatgtgcgaaggcctgggagcaagtgaaggttacttagtgtggctgcagtatgcagtgggtggggaagaggaggcgtaggggagatgtggagggagaagttggcagtgctttgaggcccatgggacagggtttccacttttctggggacaatatggagccacagaaggatttagagcaggagagtgaatggcatttgctaaaaaaaaatcattttgacatagaatgatcgtatgattcaacaattccaagcagggactcacgtagatccttgtacatgcatgttcacagagcacgattcacaacagccaaaggcggaaacaacctagagtccacggatggatgaatggatgaacacagtgtggtccatccaaacagtggaatattgctcagccttaaaaagaaaagaagttatggctgggtgcggtgacacacacctgtgatccgaacactttgggaggccaaggtgggaggatctcttgagcacggaaatttgagaccagcctgggcaacatagtgaggccctgtctctataaaaaaataaaataataaaaataaaaataaaataaaaataaaaataaaaataaaaaatttatccgggcatggtggcgtgcacctgtagtcctagttacttaggaggtggagactggaggatcgcttgagcctgggaggttgaggctgcagtgagctatgatagcgccactgcaatccagtctgggtgacagagtgagacactgtttcaaaaaaagaaaaaagaaagaaatgggcttggcattgtggttcatgcctgtaatcccaccatttggggggccgaggtgggcagatcacctgaggtcaggagttcgagaccagcctggtcaaaatgatgtctctactaaaaataaaaaaaattagctgggcatggtggtgtgtgcctgtaatctcagctactcgggaggctgaggcaggagaatcccttgaacctgggaggcggcggtgtcggtgagccgagatcatgccactgcactccagc[222 bp omitted]gaggcaggagaatggcgtgaacccgggaggcggagcttgcagtgagccgagattgcgccactgcactccagcctgggtgacagagcgagactccgtctcaaaaaaaagaaaaaaaagaaaagaaaaggagttctgacatatgctacaaggtggatgaaccttgaaaacattatgctcaatgaaagaagcctactgtctacagaaggacaaatactgtatgattccacttatatgagatccctagaggaggcaaattcctggagacaggatgtagaatcaaggttgccgagggcaatggggagttatcgcttaatgcttacagggtttccttttgggctaatgaaaaatttttggaaatagtggtgatggtcgcacaacattgtgaatgtacttactgccactgaattgtacacttcaaaatggttaaaatggctagcctgggcaacataaccagaacctgtctctacaaaaaaaaaaaaaaattaaaatttgggctgggcacggttgctcacacctgtaatcccatcaccttgaaggctaaggcaagtggatcaatttgaggccggaagtttgagaccagcctggccaacatggcgaaaccccatttctgctaaaaatacaaaagatttgctgggtgtggcagcgtatgcctgtaatcccagctacttgggaagctgaggcacgagaatcacttgagcccctgaggcggaggttgcagcaagcctagatcgtgctactgcactccagcctatgcaacacagcaagactctgtctcaaaaacaaaacaaaacaaaaaaatagctgggagtggtgacacacacctgtaatcccagctactcgggaggctgaggtgggaggatcacttgagtccaggagttcaagggtgcagtgagctatgattgtaccactgcactccagcctgggtgacagagcaagactgtctctgagaaaaataaacataaaagtggttaagatggtgaattttatattatgcatattttaccacaatttttttttaaaagagagagagaaaaaaaaatgaataggccgggtgtggtggctcaggcctgtaatcccagcactttgggaggctgaggtgggtggatcgctcaaggtcaggagttcgaaaccagcctggccaacatagtaaaaccccgtctctactaaaaatacaaaaattagccatgcatggtggcaggtgcctgtaatcccagctactcaggaggctgagacaggagaattgcttgaacttgggaggcagaggttgcagtgagctgagatgacaccactgcactccagcctgcgagacagagcaagactccatctcaagaaaaaaaaaaaaaaaaggatgcaatcactttggctgctgtaggagatccaggatagagtaagtccaggaggtgctgggggttcagatcaggataagggcaaaggcgagggtgagaggtgggaggttgggggcgtggttggggtgtggcttgggcatggcttggaggcgaggctaacagggcgccagggagagatgagagtgaaatggaagatgaaagataaagcaggcagctgagttcctgcacccattctctcgacgcctaagcactccaattcacctgcaagtcttcgtggcctgacgtctccaaacccgccaccctttatggctcagcctggggtggcccctaacaaggagtcccaaatggggattgatgccacttcttcagtacaaagaaagattaaagcgacactgggtaaaaacactccatcccggccgggcgcggtggctcacgcctgtaatcccagcattttgggaggccgaggccggtggatcacctgaggtcaggagttcaagcccagcctggctaacatggtgaaaccccatctctactaaaaaatacaaaaaattagctgggcatggtggcggctactccagagggtgaggcaggagaatcgcttgaatacaggaggcggaggttgcagtgagccgagatcgtgccactgcactccagtctgggcaacagagcgagactctgtctcaaaaaaataaaaaataaaaaacaacactccatcccggcagccgttcctccacgtgcattcgcttacaaggtgcagatgtaatacctgcttttaaattcaattaagtcagaatcagttctgctcctagaatacattacccagttggagacagccgggggaagagggaaaaaaaaaaaaaaagatggcaaacaaacaaacaaaaaaaaaaccccacacacaaaacacaacgcagacctatttagagatttccctctaaatggattttaattctctcgatttatcagaggccagaggagctgctgacagcctgcatttggtgtctgcaaacccagtttcagccacagggaggggagaggagggatcgagtttatgttgtcattttcctccagtgctggaggtctggggtcgcccagagatgggttcaaatcccagctttgccatttactggctgcatgaccttcagccaagcaccgcatcctctcagagctttgacctactcatctggaaaatggagataatgacagggtttatttcagaagagccttgtgaatgatggcctggattatccaagaggattcaggttaaatcctcagcacaaggcttggcacatagtgaacgctcagtaacgcagggatgatggtgatggtgatgaaggtcgtcgttgttggtttttttgtttgttcgttttttgagacggagtctcactccgtcacctaggctggagtgcagaggcgccatcttggctcactgcaacttcggcctcccaggttcaagagattcttgtgcctcagcctcccaagcagctgggattacaggggtgcaccaccacacctggctaatttttgtatttttggtacagatgggggtttcaccatgttggctaggctggtcacaaactcctgacctcaagtgatccacctgcctaggcctcccaaagtgctgggattacaggcaggaaccgccacacccagcccactgttggtatttttttccaaccagagacccagccctgtgctaggttactgtagggaaagaaaaaagatgcatgaggctcaagtcctgcctttggaggctgggaggctttgggtaagcagggaagaaaggggtaggatggacacaggctcaggacagagaaggagccatcctgaggctacacagctcagagctgtccctttgcaggcctggatcctactcgtactgggttcagactctaccgtctgacgttgggcgagcaccccacactgggcctcagttgtaccatctgtagatggggaaggaaaagcgaagtttcctgagccaaaaggctcatctgtagggtcagatcagggggcgctgggacccccaggagggtgtttgtcttcataagagtctagcgaggccgggcacggtggctcacgcctgtagtcccagcactttgggaggctgaggcaggcagaggccgaggcaggcggaggc[137 bp omitted]tgaggcaggagaatcgcttgaacccaggaggcaaaggttgcagtaagccgagatcacaccactgcactccagcctggcgacagagcgggacactccgtctcaaaaaaaaaaaaaaaaaaaaaaaaaaaaaaaaaatgcctagtgagggggattttcacaccagaatcagaatcagaaagggttttaggacaaaaagggtcctggcctgtaatgtcccctggggagctcaggggggccatagttggctctcctaaagggttgcttcatccacagaaggcctcccttcatcccgggcccacggccctcatctgtgcctgccctgaaagggcaactggggagggtgggaggtgtcgaggacactctagtcccagaatcagggttggggggcagaggtctgacaccacggttgggaaggctaaagagaggcgcagtggcttattcctataatcccagcactttgggaggctgaggcaggtggatcaattgaggtcaggagtttgagaccagcctgggcaacatggtgaaacccagtctctactaaaaatacaaaaaattagccagccgtggtagagcttgcctgtcatcccagctactcaggagtctgaggcaggagaatcacttgaaaccgggaggcggaggttgcaatgagctgagatcgcaccactgcactccagcctgggcatcagagcgagactctgtctcaaaaaaagaaaaaagtacagttatccttgagaggatctaattgcgaggaggcaccaagggagcttctgagggttggaatgttctacgtcttgctgtggtggtagccaagggggtctatgtccatgtcacgattcctcaagctacacacaagatttgagcactttataagttatacatcattaaaaaagagggaagactcagagagg[141 bp omitted]tgaaactccgtctctactaaaaatacaaaaaaaaattagccgggtgtggtggcgggcgcctgcagtcccagctactcaggaggctgaggcaggagaatggcgtgaacctgggaggcagagcttgcagtgagccgagatcacatcactgcactccagcctgggcaagactccgtctcaaaaaaaaaaaaaaaaaaaaagaaacagagaaaagagagacaaagagataaacagaaactgagagacatagaggaaactgaaatataggaagagagagagagacagaggcagagagacaggaagagacagagagaagaaaagaaggaaaagaaggagtttcaaagcagaaaggtggggagaaatgaggaaattgggaagaagaactgaggactggagaagagaaagccaaagaagagggggggaaaggaggagaaaatagcaaatggcccaagaagtggcgggagagagtggctggggaggccaggaagccaggagctgtcacaggcgaacatgtccttaattgtaattacatgggaacatttagtttgtagatgcagcagaaatgaaaacgctgtgctttgcccattcatctaatggctgttagtcaaccactcttcaaaaagaaccccccacttctccgccccggggctgtggttgcatggggggcagcctgcggggagctgatcagaggagatggttttaaactaatgatgtcctcagggataccgagagggacagttctgggaagaatagaatttccccaccaaaaacccatggctggtgaatttctgagccctgcaaacagttaccagcccggaagtcagcagctggcgagtgggagttctaatctgcaaggctagattaggggagatacaatgtatccaagagagatcaaggttctttaactcaccctagcgggtgggggaagccttcctagaagggctgacatctaaactgtgcttaaatgtatactttgaggcaggcaagcaaaaaaggaaggaagaaaggccttccaaagagagagaacagcttgtgcaaaggttgagaaggaattacgcttacaaccatgagcgtgactgggtgggaagtggggcagggatggggatgggggtgtagctggggaagtcagcagagcccagaccacttataagacatgctgaggagatgggactttgtcctgagggcgatagggagtcatggagggttcacaacaggtgaacacagtccaggataatattttttaaaaattgggggccattcatatgatatttcacttactcaaaaagagagagcttcctggtcctggaggcatgcaaaataaggtcacactaaccacccggggtaccctgggggatttcaatatcaggtggggctgaggctgggactgcagaattggggttctcaggcaggagggcgaggtgctgagagaggtttgatgtgttactaatctcgcttggggggtacacttggccctctggctttgagacagtgaggagcagggggtgtggatgactcaggagtacagacgccagagtgggaggtttgagtcagcgcctagtgtatacctctcccagccactctcagctggaggtgactcactcattcatttggccttgaatgtagaggactggagtaggcagtgggggaaggaaaagaccacccaactatcccactactgtttacccctcctgccactgtgggtccagtcctgtgcaggaacgaccgatccacctcccccacaacccaatacttctagaatgaaatctgttggctccaaatagaccttggtcttgtcctctcctcactcctcctgtggttccagccttgacctggcaccatcgctgcttatctggatgagcagggtcacctccattctggtacctggctcccaccccgcagtctctcctccccacagcaagcagccagagagctcctatgaacctcctatgagtcagcgtccatccctcctctacccacagccctccatggcttccatctcccttggggtcaaagcccaagtccttacgaagtgctttttagccctgcactacctgccccatcccttccccaccctctgctcccctcctccctctctccccctcctcactctgctccagccacacaggcctcctcgctgttctgtcagacttagcgctgcctcgggacctttgcacgggctggttccctccacctggaactcttctcccagttttccccacagcttctttttattctccttaaacatcacctcctcaggaaagccctccttgattgctggtctaaagtaacatccaactcactctccacctcatgcccttgtttttattttcgtcatttttttttagtttgcttgtatggtcttttgaaatgacccgctgtatctgtttttccccaccagacctcaccgtggagcctgggcccaactcggtggtgccgtatccccagcaccccgtatgggcaagtgattgtgcttgttcctcgattgaatggatcttcacagcagtcctgggatgtggaggcttttatctaccccatttcacacagggaaaactgaggctcaaagacatggagccctcccccccaccacttgtgggtgcttcgaggatgtccgtggaccatgcgcgctccctggaattctgtgggaggaatgctgcggtctcgggcagctccacaaacggaggtgtgttctgagtgggggtgggtgcgtctgtccatgctgcctgggggacaatgtgtgtgtgtgtgcgcgcgcgcgcgtgcggggaggggagggggagggaagggggggaaggggtgataaaagagcccttgggaggggagctgctaatttcgctgggggaaggggaccctctcattccccttctgctcttcccacccctccccctcccccaccaagatgcccaggcgaggggaccttcctgggagggggacgacacggagtagggggcagcgtggagttgggagacagggagtaggggcgacactcttccaaagaccccctcacagccccgcagatattgcaaattccccatttcctgcactcccccctcgcttcccctcccctctcctccccttccccccttccacaggatcctccggggctggaccctgcaacccctcccgggtcccgggagctcgcgccctgctcccgcccactggacgcccgcagccaatggccgcgccgcttgatgaggtaatgcgccccctctgcgtccccattggccagcctggagcccattcccttgtcccctgcaagcagtggagacccagcggggcgcgggcggggtgttcccagggtggcacctgggtacctgcgttccccccatgcccctctctgtgaaaccccccacttgcccctccccctcttcgggcccagtagggtccaggggctggacttgggggactcctgcccccagcgacgcccagttcctcccataggagcaaaaaggacaaaagactcccccatgcctccagtagtcaaagacccccgagctgcccatcccagacactcgcgcaggtatggagcgcctactgtatgccagccccgagactcattggggatgcagcggtggcgacatcagccccgggtccctgtccccacggggctcccaggataatggggaagagaggcaggccaccagccacgtcctccccctcctagtcggtgctgcggatgaagggtgaggagggtaggcagaggcaggaggggacagccccctcttttttttttttttgagacggagtctcgctctgtcccccaggctggagtgcagtggagcaatctcagctcaccacaacctccgcctcccaggttcacaccattctcctgcctcagcctcccgagtagctgggactacaggcacctgcc[187 bp omitted]ctgtggcctccaggagactttgggggccatatctcctcatccactgctgtattcattcagcaaatatgtccttagtaccccctccccagtccactgcctcttgttttgtatatttcttcttttttctcccccttctgtccccataaccactggaattggcttttttttttttttttttgacagggtctgtcacccaggctggggtgcagttgtgtgatctcagctcactgcagcctcaaccttctaggctcaggtgatcctgccacctcagcttcccaagtagctgggactacaggtgaatgccaccacagccggctaatttttaaattttttctagaaataaggtctcgctatgtttcccaggctggtctcgaactcctggcttcaaacaatcctcctgcctcggcctcccaaagttcagaatgggctttaaaacaaaaagcctgtgtgtgttcttgaaactggtaaggttgttttgtctgcctgcgtttgttttttcttttctttttttttctttttagacggagttttgctcttgttgcccaggctggagtgcaatggcacgatctcggctcaccgcaacctctgcctcccgggttcaaatgattctcctgcctcagcctcccgagtatctgggattacaggcatgcaccaccacgcctggctaattttgtatttttagtagagatcgggtttctccatgttggtcaggctggtctcaaactcccaacctcaggtgatctgcacaccttggccctccaaagtgctgggattacaaatgtgagaaagaaacgtgcccagctgcgtttcttttctcttaactttcttattgaggtgaaacttggaaaccccaaatgcagaaatctcaagtgtacaagccaggtgaattttgacctaaacacacaggggtgcttgtcaccagcagccagatggagataaagatttagggcccccaactagtgggaggggagtaaggtgagtcttgtagcagaacaaggaattctcttttgtttgtttgtttttgatacagagtctcattctgttgttcaggctggagtacagtggcatgatctcagttcactgtaacctccacctcccaggcttaagcgattctcctgcctcagcctcccgaatagctgggattatgggcacccgccaccatgcccggctaatttttgtatttttagtagaaacaggatttcaccatgttggccaggctaatctcaaactcctgacctcaggtgatctgcccgccttggcctcccaaaatgctgggattacaggcgtgagccactgcacctggccggaattctctctttgttagcaagattgatgttgtgttcatcctggatttttttttttttttttttttttttgacagggtcttactctgtctcccaagctggagtgcagtggcatgagctcagctcactgcaacctccacctccagggttcaaacgattctcctgcatcagcttcccaagtagctgggattacaggcatccaccaccacgcctggctaatttttgcatttttagtagagacagtgtttcatcatgttg[138 bp omitted]gatacaggtgcaggtttgcaacataggtaagcatgtgccgtggtagtttgctgctaggtattaaacccagcatccattagctactcttcctaatgctctccctccctccctcttccaacaggccccagtgtgtgttgttcccctccctgtatccatgtattctcatcattattcagctcccactgttaagtgagaatgtgcagtgtttggttttttgttcctgtgttagtttgctgaggataatggcctccaacaccatccatgaccatgcaaaggacatgatctcattcctttttatggctgcatagtattccatggtgtgtgtatatgtaccacattttcttaatccagtctatcattgatgggccatctggatattttatttgcattaattttgatttttttaaaaaaatattgcagtcagctgtgcacagtggctcatgcctataatcctatcattttgggaggctgaggcaggaggatcgcttgagcccacaagttagaggccaacctgaacaacatagcaagaccccatctctacaaaaaatgaaataaattaaccaggcatggtggcgcatgcctgtgatctcagctattcaggaagctgaggtgggaggatcacttgagcccaggagatgcagcctgcagtgagccgtggttgtgccactgcactccagcctgggcaacagaacaagacccgatctgtttaaaaaaaaaaaaaaaaagagcgaggcgggtggatcgtttggggtcaggagttcgaaaccagcctggccaacatggtgaaactccatctctactaaaaatacaaaaattagccagtcatggtggcacacaccagtaatcccagctacttgggaagctgaggcaggagaattgcttgaacccgggaggccgaggttgcggttagccaagatcgtgccactgcactccagcctgggtgacagagcaagactccaccaaaaaataaattaatttaaaaaaataaagaagagagagagagagaaggagggaaggaagggagggagggaaaaaggaagaaagaaagaaaggaatgaaaggaaagaaagaaagagaaggaaggaagagaaaggaagaaagagaaaaagaaagaacaaaagaaaaggaaagaaagaaaagaaagagaaaaagaaaaaagaaaggaaagaaagagaaagaaagaaaggaagaaagaaaagaaagcaagcaagcagaaaaaaaagaaaaaagaaaagaaaagaaaagaaaaaggtcgggcacagtagctcaggcctgtaatcccagcactttgggaggccaaggcagtggatcacctgaggtcaggagtttgagaccagccagaacaatatgacaaaactccgtctctactaaaaatgcaaaaattagctgagcatggtggcgtgtgcctgtaatcccagctactcaggaggctgaggcaggaaaattgcttgaactcaggaggtgaaggttgcagtgagctgagatcacaccactgtactccagcctgggtgacagagcgagactccatctcaaaaagaaaagaggagagaagagaattgaagaaaagagaattgaagagacaaaaattgaagagatgagaattaagagaagagaaagagagagaagagaagaagagaagatgcagtcagatgctatttagcttgattgctgagtttttgttgctgttgttgagttttttggtcctcccttaaagtttgctcctgaggagaatccctccaccacctcaccctagccctgccctggggaagagcattctagcacccaaaagatctctcagacccctgtcatgaactgcccctctcctcccaggtgcatcttcctactctccatcaccactgtttcctttgcctatttttaaaactgatgttttgaatctggcatcttccactcagcatagttgcattggagattcatccaagctggtgcgtctctccatagtccaaccctttttattgctgagtcgtattccagcgcctgggtggaccgcagtctgtttaccgagccccgagccaccagcggataggcatttgggtttgtatcctgtgtttggctgtcacgaagaaagctgctacgaacatcctcgcacatgtctccgggtggacatatgcttctgtttctctcggggaaacacctagcagtgggtgcctgggtcgtatggtaggtgtctgtttaactttttaaggaactgccaaaccgtttcctagagtggctgtaccattttgcattccctccagcagtggaggagcgcacccgtgagtgcgtatttttggcattcttttttttttttttttttttttagacggagtcttgctctgtcgcccaggctggagtacagtggcacgatctcggctcactgcaagctccgcctcccgggttcacaccattctcctgcctcagcctcccgagtagctgagactacaggcacccgccaccacgcctggctaattttttgtattttttagtacacatggggtttcaccgtgttaaccaggatggtctcgatctcctgacttcgtgatccaccctccttggcctcccaaagtgctgggattacaggcatgagccaccgcgcccggcctttcttggcattcttgtatcttccctttggatcagctttatggaggtgtaatttaaggatacagttcgatgaactttgacaaatgtatacacctgtgtagccactacctccttccagatgtacaacatttttatcaccccaggaagctccctcaggacatgtgttgttattttatttatttgtttatttatttatttattttggggatggagtcttgctctgtcgcccaggctggaggacagtggcgcagtctcggctcactgcaacctccacctcctgggttcaagcgattctcctgcctcagccctctgagtagctgggattacaggcatgtgccaccacatccggctaactttttttgtatttttaatagagactctgtctgggagacagagtgaaactccatctg[137 bp omitted]tatgaatattcccattctttttttcttttctttttttttcttttctttttttttttgagacggagtcttactctggcgcccaggctggagtgcagtggcgccatctcggctcactgcaagctccgcctcccggattcacaccattctcctgcctcagcatcccgagtagctgggactacaggcgcccaccaccacgcc[181 bp omitted]gagttaccccgggccctgctgggagtgttaaataatctatgctgagtgcatcttatcagcatcctaaaatctggaacattctagagttctgaaatgcatctggcccaagggtttcaggtgagctcaattattatttatggggcctactgtgtgcataaattcttttttttttttttgagacagggtcactctgttgcccaggctggagtgcagtggtgcaatctcggctcactgcaatctccacctcccaggctcaagcaattctcatccctcagcctcccaagtagctggaattatagacttgtgccaccatgcccagctaacttttgtatttttttttttagtagagacggggtttcaccatgttgcccaggctgggcttgaacttctggcctcaagtgatctgccctcttcagattcccgaagtgctgagattacaggcatgagccaccacgcccagccaaattcttctaagcactggtgattagaacagacctggcccttacgggttcacagtccagcgagggaagaaggacacagggcatcatgtttacagcactgggtgtttacagcatcagggccatgatgggggagtcacaggcacggtggggcccagagggagcacctgactcaggctggggcatcagggaggcttcctggaggaagtgatgcctgagcaaagacctgaaggataagaaaggggtagcgatgaggtcaggagtttgagaccagcctgatccacaaggtgaaaccctgtctctactaaaaatacaaaaattagctgggtgtggtggcaggcacctgtaatctcagctactcaggaggctgaggagggaggatcacttgaacccgggaggcagaggttgtagtgagctgagatcatgccactgcactccagcctgggtgacaaagtgagactccatcagaaagaaggaaaaggaggggaagggagaggagagaaggggagaggaggggaggggaggggaggggctccaggcagcaagtatagcttgtgcaaaggccctgaggtgcttggagggcctgacatctgcccctcggggcttcaagttatcctggtaggtggaagaacacagatgtccacattggctttgtaacctacctggtgaggcccagagccctcctctgaccccagggctcgattgagtctttgcagccagcgggtatccagggggcaatcactgatctcgtctcccctgaggtttgctgggggcttgaccctgcagccatcaggatcccctccctcaaacttcaccctcatccttgatgctggggtgggggcaggggagacaggtcggggaggtctcactccagacagacacactccctgggccttggcagctggctcatctgaggctgaagaatttgctctttgaaaaaggcttcgctctgtggaaatctgacatctttgtggatcaattgtccctttcttctgcttcccaggcttgaaactctgttctttccctcccccagtcccctccatataatctatcagccattccaacacctctgcctgcagagtctatcccagatccacccacttctccccgctcctgtgtctccctcttggtccagccccatcactgccctcccggagcaggtgaggcacctccaccctggcccctgccacccccatccccacagtcctctctgaagcagcaagagggcgcaggtgagaacctgaatcaggtcccgtccctcctctgcctatagccctccatggctcccatcttcctctgggtcaaagcccaagtcctcactgaagcccacaaggccctgcatgacctaccctgtccctgccctgccctccccctcctccctgtctcccccttgctccctctgctgcagccacatgggcctcccggctgttcctccaatacaccaagtgcagtcctacctcagggcctttacatgggctgaaatgctcttcccccagctgcaataactt[133 bp omitted]aaaacccccgtctctactaaaaacacaaaaaattagacgggcgtggtggcatgggcctgtaatcccaactagtcaggaggctgaggcaggagaactgcttgaactcaggaggcaggggttgcagtgagctgagtttatgccactgtgctccagcctgggcaacagagcgagactccatcaaaaaaaaaaaaaaaaagaaaagaaaggaaggaaggaaggaaggaaggaaggaaggaaggaaggaaaacattatgtcaaggatgtgagtttcaagaaggcagtgactccagcaccatgcctggcacatagtaggtgctcaataaagattccttctacaatggaaggattagtcatgaaccctcaggaaaaaaaaaaatagctttgtgttcccaagtcctgcctggaagcatctggctgtggacgccaatagagatattagggggagaaaaaaaaaagggtccaaattttggttgcctcctcctgcctttaattattttgtcgacaaggctcacaattcagtaagtcaaggtggcatttgagagggacggttccctttagcgtagctgacagctaatttgtgggaagtttaattacaggcagcgttaattaactggcagagtactgggcaaggaaggcagccatctgttcctaaaaacgtcctcccctcctgggcctggctgggaggctgtgaggggtgggctagaaagaagacagggtgaagaggcggggacagaggaggagggaggagggaggaccaggtgatgaatcacggccttcttcacactgtcagggctgagatctttggcagccagcctcctccagtggcctctgggagtggcagtaacagtttctgggaatctgtctctcattggttgtatcacgaggagcagagggtgtgggacagaggaggtgaagagcccactattcttagcccatattagagagggttggcacctaccaaaggaggttgggagaaggaactgggacagagccaggggtgaaggacacactcagcagtcttggcctaagagggacagatcactctgtccctgttccacaatgagctccttcattctgaccattcttcatggggatggtacagaaatagcaacagcctctggaggtgggtgctttttttttttcttttataaagacagagtctcgctctgtcacccaggctggagtgcaatggtgcaatcatagctcactacagcctcaactccccgggctcaagcaacaatcctctggcctcagcctcccaagtagctgggactacaggtgcacgtcaccacacccggctaattgttaaattattcgtagagatgagggtctctctgtgttgcccaggctggtctcaaactcccgggttcaagtgtttctcccacctcagcgtcccaaaaccaagattacgaagccgagtttgggattacaggcacgaccccctgacttacagagatgggcttttgaaattgaatcttagctttgtccctgctgtttgccctggggcaagtcacttaacctctctgggttcagtttcctcatctggaaaatgggtttgattagaacagaacctattgctatttgtctgtcttttttttttttttttttttttttttttgacacagaacttcactttgttgcccaggctggagtgcagtggcacaatctcagctcactgcaacctccgcctcccaggttcatgcaagtctcatgtctcagcctcctaagtaactgggattacaggcgcctgctgccacaccctgctgattttttgtattttagtagagacggggtttcaccatgttgcccaggctgatctcgtactcctgagctcaggcagtctgcccatctcagcctcccaaagtgctaggattacaggcgtgagccaccatgcccggcctgtcatttatctttctagactaattaagcccaagtattttcaggctactgaagagatctctgttattacgagaactgtgtatgtgtattcaaaggtgcaaagtgttcaataaggttgagaactcctgtgccttctgcaactctgggccctcgcatatgctgttccttccacctggaacacccttcccacccctgcccagtggcttcggttttacttatgagccttgacgtggaagcctcctccctgggaagccttcccgggcccgccaggctggggcaagtgcctctctggttgcccgcaggatctgcgtgtcctccatcacagccctaatcaccctgtccccgcctggtcacactccgacttccccactggactggaagccccaggcaggcagggactgggtgcccagcacaggcctgaagaagtaggtagtcagtgcttgtgtggacaaacagcgagagctatgacccatacattgcaaggtagaggccagtggaattcaaagtcagagccgtttaaaaatgggccaggccaggtgcagtggctcacacctgtaattccagcactttgggaggccgaggcaggaggaacacttgaggttaggagttcaagagcagcctggccaagatggtgaaaccctgtctctactaaatacacaaaaaattagccgggcaagatggcgggtgcctgtaatcccagctacttgggaggctgaggcaagagaatcacttgaacctgggaggtggaggttgtagtgagccgagatggcgccactgcactccagcctgggtgacagagcgagactctgtgtcaaaaaagaaaaaaaaaagatggaactgctgttcttgaacatttcaagccaagccactaggagggacccctcagagctctgatatcctcacacagtcagggcagtcctggggtcggggagtcctcagaaataagttcaaatcctggctctaccactgctctgctgtgcaaccttggcaagtcgctttccctctctgggctcggttttctcagctgtcattcggatgtgcctcgtttctggcccctccacatctcagccgagggctctgcctccagaactggcccactttcactcgtccacgcccacccatcggctcctgcctggatcaagaccgtcacttcctccctctccacacctctccacccgtcactctccgcatcaaacgaagcctttaaaagcattaatcagctccctgtggcaaaaggcttgaactgccacttcaccaaagaagacacacagatggcaaaaaaaaaaaaaaaaaagcacgtgcaaagatgctcaatgccattagtcattggagaaatgcaaatccaaaccacagtgagatatcacttcacacttgctaaaatggctaaaattctttcagctgacaataccaagagcgggtgaggatggcgagcatccgaagctctcctacgctgcccatgggaaggcaaaacggtgcaaccccttaactccttatgaagttagacatacatgcaccaaaccccccacagcaatcccactccagggaactcccccaagagagatggaaacacacgtccgtgcaaaaacccgtacctggcagtttctaacagctctattcctaatctccccaaactggaagcgatccagcaggtgtgtttgcataaacacaccgggtcacctccacgcagcggagtgctattcggcagtcataaggaaacagcacccgagacacgcaacaatgtgggtgatattcaaatgcattctgcagagcgaaagacgccagacacaaaaggccgcccgctgtatgctcccatttataatgatgttctggaaattgctctgggaacccccgggtgtgtcttctcctccaggaaaaggctaggggcagagactagggtgtgtgtgtgtttgttggggggggcggggggaggtggaggtgggagttggttgggacggagtcttgctctgttgcccaggcttgagtgcagtggcgtgatctcggctcactgcaacctccgtctcctgggttcaagcgattctcctgcctcagcctcccgagtagctgggattacaggcacctgccaccacgcccagctaatttttgtgtttttagtagagtggggtttcaccatattggccaggctggtcttgaactcctgacctcaggtgatccacctgccttgacctcccagagtgctgggagtacaggcatgagccaccgcgcccagcctgttttttgtttgttgagacagggtcttgctctgttgcccaggctggagtgcaatggtgtgatcgtggctcactgcagcctcaaccttctgggctcaagcagtcctcctgcctcagcctctcaagtagctatgaccacaggtgcacaccaccatgcctggtttgtttttgtttttgtttttgttttgttttttgtttttatttttgttttgtttttgtagagacgggtctcaccatgttgcccaagctggtttcaaactcctggactcaagcgatcctcccacctcagcctctcaaagtgctggggttacaggcgtgagccaccatgcctggccaagacaggttttgtccactgaagcattcctggtagaggacaaagggacataaggaaacattttagggagatgggactgttctgtatcttgatagtggtggggttacgtgattgtgcatttgtcaaaattcatagacctgtagactaaacattaatgaccacttctcctctgctcccagacgcagtctcctctggctacactgcccattttgacgtttcctgcctgaggacctctgcatttgctgttccctctgcctggaatgctgttccccatatctcccttcatgtctttctgtggttgaatctttccaatctattttttttttttttttttttgagttggagttttgctctgtcgccaggctggagtgcaatggagcaatctcagcttactgcaacctccacccacctcccaggttcaagcgattcttctgcctcagccccccaagtagctgagaccacaggtacatgccaccatgtccggctaattttttgtatgtttagtagagacggggttt[142 bp omitted]tcctcagggaggccctccctgatcactcctaactaaattcaccacccccctccataacccgctattccatcaccatgttgcactaaaaaacaaaaacaaaaacaaaaaaactgcaattcattagataataaattccctgagagtggggtctctcttggtcacagcagtgtccccagcacagcactagcggatagcaggtgctcattaaatatggatcaagaggcaggagtttgagatcagcctgcgcaacatgaaaaaacccactacaaaaattagccaggcatagtggcgcatgcctgtaatcccagctgattaggaggctgaggtaggagaatcgcttgaacccgggaggtggagattgtggtgagccgagactgcaccactgcactccagcctgggcaacagagcaagactatgtctcaaaaaaaaaaaaaaaaagagagagagagagagacagtcgagtgaaagagcaaagcacacagggctctgtgaacccgggtttgaattcaggcttggcccctggtatgctgtgtggcttcaggtaaatcgaatcacctctctgttcctcatctggaaggtggaattaacatgcctctcttgcaggagtgtggggaggtttaatccagcaggcaccagccctgagctccctgagtcctcctgtgggcaaaagccccagtcctcatttgcagatgccctggaacctacctagcctcgcccagccagggtgcagcctcagggaatgcttgctgaatggcagaatagacaaatcagtgacaacacaagcaaatgccttttcctggtaattaagttcacttggtaattaagtcctcaaacatcccagccctccctcatcttagccctaaggacttattttgcaattctccaaaatgctcagaatcaactgcaccgcccgtcccttcacacggactgtgaaccaggcatcgcctggtgtgctctttcccccaacttccacttttcttgccaagttcctacttgtccttcaagtccacttgaaatctcccctcctccaggaagcctgccctgaaccccattatctgggctccctcagccctggctgtctgggtccatctcttacccaagcctggggctccttgagggctgggcaggggctggagaactcttggagtccgctgtgtttcccagcgcagatgtgggcacccagtggggaaccctaaatactcagtgagtgcattcatggggccagggttcaaatcccagctcagtcactttgcggctttgtagtcctagtgagtctggtcccctgtcacagactcagtttcccccctctagaagatggggtgtccacaggaacctggccctggatgcagggggtcagcggagtttcccgcaaggcacggtcacaggctgcaggctgcattgctcagtggcagtgctggtggctcctgccatccccgagtgcccccctcctctggggctcagtttccccatttggccacactcccccttagacaaacacagacggggcgccacctggctgggcaggagggggcctcggcagcttctcacgaagaacagcagccaaggtgggggctggcggggctggcacaggccggcctcgttaagctgccagtccttggcaccactctgctttcgtggaggcgtctggagaagggcccaggcctggctgttgggggactgaggaagctgggatgaagctgagaccctttttcagagggggcaggccctgagtgatggcaaggagttctatgttcacttattaagcatctactggatgccagaccaggctactcaggcagggcgtttgcccgtgctgttctagctgccaggatcgcgtttcctgttcatagcactatccactgctcattctgatctcagtctagaagacaccacctccaggaagccttctagattctctagaataagccaggtgcggccggg[175 bp omitted]gaggcaggagaatgccgtgaacctgggaggcagagcttgcagggagctgagatggtgccactgcactccagcctgggcgacacagcgagactccgtctcaaaaaaaaaaaaaaaaaaaagaataagccaggtgcctccctttgggttggcacggtgcctgagttttccccatcacagtttgatcactcaatattttatttttagaggtggggtcttgctctgtggcccgctgctggagtgccacagcatgatcagagctcactgcagcctcaaactcccaggctcaagcgatgttcccgcttcagcctcccgagtagctgtgatcacccaatattataactgggctgtgggcaggtcacttaggccatcaacaaatgcaaacagagcacttcgtacgtggtaggcactatgcttagcaccgtccatgctcagcgaaccccgcagtgcaggtgctgatgctgcctcctctttacagaaggggcaactgaggctcacagtggctgaatggtggagtgaagccacatggcctggagtctggtgcacagaagggcccgggaaaagctcatttccatccccagggacagtgagctcactcaccactgaaggaggcctaagctggaggtgtggggattcattcattcaacaaatatgtattgggcagccattgaaggccaggttactcaagtgtgtccgagtgacaggtggtgttggacgcctccaacatctgttgtcttgtcctccatagtaatagaagccctggttttcagctgcacagttggccattcagaataaatactacatttcccagcaagctttctgccaggcatggccacgtgactaattctggccaatgcagtgtgagcagaagtggtgcctgggatttccaagaagtgtccttaaagggacagggtgagctcttcctcactctttcctcctcattgcctgggaggcagatgtgatggctggagctcacgcacctgccttgtcccacgaggaggaggccatttactgaggatatggtggatggaaggagtctgggctgcagacaccccagcatctccatgccatcccaggaatgactactcacattccacattcagaagcaaatcagccctgtacgcctacaccgctgtggttgggtcttgcttaccacagccaacccgagcctgaccgctacatttgtccctctctgcttctgtttttccactcttgcctcctctcatgcctgctggactgaaaaacctgcctctgcttggtagcactgggctgcaagggccatccacagtggccaaggcagtggcctctagatagtgtggcctccgtctgtggcagtagacagagcaggggcaggagtgccaccaggggccgggcatggtggctcacaaatgtaaccccagcactttgggaggctgagactggcagatcacttgaggtcaggagttcgagacaagcctgggcaacctagcaaaacccccgtttctattaagatacaaaaattagccgggcatggcagcatgtgctcgtggcctcaactgatctgcccgcctcgggctcctaaagtgctaggattacggacatgagccaccatgcccggccttttctccctttcttagaaggaaaacctctgcaaagatcttatttccaaataaggtccattcacaggggttggtcagaaccaggggttaggggttcaacatctctatttggggcccacccactacatggtacaagagatttgtgtgggaggtgatctcagaagctgtgggaggggagagaagtgggtggggaagggaaggagacagtagcgggctcattgacaagacagtactgggttcgttgacttatggagctcattcgactggggacctctaggagatatggtagaacatacttcgatttgtcccataagagggacgagggagtgggggcatttatctaccacctcccatctgtcactggctgagggctgctctgagaggtattaggccaacacagaaaatctaaagactaagtagtcagcctggcaaagtgaagttgaggagcaagaattctgttccaggcagagggaacagcatttgcaaaattctagaggtgaacaaagcaagatgcctctgggacattgcaaatcatccaggcttcagagattggcaggcgcccaaccacaggggtgcatgtaggccacagagaagagtgtgggctttatctggagggcaatggggagccatgggagagtttagagcatgggaaagactatgttacaggtctggaagctgaggcccagagaggctaaggaatttagctgatgtcatacagcttatgaatggcagagacagaaatccgacttgagtgggctgcagacagattgagggtgtgaaatttgggggatggggactggggaggaggtgaggctgatgcccagggctgaagctcaggcagggggcacagttggagacccagctggagaggcaatgctatagggagagagaatgaagctggtgcaagcctggaggccaacctggcggtgcggacttgggaccactgacccccaccagccccaccctgaccctggcacttgactctccctccaaatcaagtccaggagggctctgaggatatatggactcagacctgagtccggataaaagagccagctacggagagaaagggctttccaggcaggaggcccagcccatgcaaaggccctggggcaggatcctgcctggtgtgttggaggaacagcaaggagatctgtgtggctggagcagagtgagggatggtgacagggggtcaggaatttgggttttaagcactgatctcattgtaggggggcgtggcttgaacaagtctgggtcactcttggagtctcagacaagggtaacattgaaccttctacagtgtgttgctaggaacctccagaagctgatgctggtagcgtcttcgcacagtgagggctgaatctgcactgctgggggccggcagcccttttgaagcatccctgggcctccttgggtccaaagataccctgagccttcaagaagttatctcaaagcttgcccgggtaccggcaaatcacagacctaggaatgatccattggccacaggcccaggcagctggcagctcctgggacagaatgtagcagggcgatgtcacagaagctgggggcatctagaaccctggtgactcctggtctccatgtcatctgccagaaaggccacctgcgccagcacctcctgagaccggccttcaaagacacgacgcatgccgctctgccgtccggagcacttaatgcctagagccagcagggtcccagtggccgcgtcactgcctctgagccacgcggtcattccaactcaactgccctcgcgtcctggccacaggccccctgggagaccccggagatgcccaaaggcctcatgcctgccgcctccagtgggacctagcagcacacagacagcgaagcgggtgaccatggggtggccacggccgggccgagccctcgtggcagtcaaagccttgctggtcttgtcgctgctccaggtgcccgcgcaggcagtggtacgggccgtgctggaagacaactcgagctcggtggactttgcggatctgccggcgctgttcggcgtccccctggcccccgagggcatacggggctacctgatggaggtcaagccagccaacgcgtgccatcccatcgaggccccgcgactgggcaaccgctctctgggcgccatcgtgctgatccgccgctacgactgcaccttcgacctcaaggtgctgaacgcccagcgcgccggcttcgaggcggccatcgtgcacaacgtccactccgacgacctcgtgagcatgacccacgtctacgaggacttgaggggccagatcgccatcccctcagtgttcgtgagcgaggccgcctcgcaggacctgcgggtcatcctgggctgcaacaagtcggcccacgcgctgctcctgcccgacgacccaccgtgccacgacctgggctgtcaccccgtgctgaccgtgtcctgggtgctgggctgtaccctggccctggtcgtatcagccttctttgtcctgaaccacctgtggctctgggcccaggcctgctgcagccacagacggccggtgaagacgtctacctgccagaaggcccaggtccgcaccttcacgtggcacaacgacctgtgtgccatctgcctggatgagtatgaggagggcgaccaactcaagatcctgccctgctcccacacctaccactgcaaatgcattgacccctggttctcccaagccccccggcgctcctgccccgtgtgcaaacagtcggtggccgccacagaagacagctttgactccaccacctacagcttcagggacgaggacccctccctaccgggccaccggccccccatctgggccattcaagtccagctacgctcccggaggctggagctgctgggccgcgccagtccccactgccactgcagcaccacgtccctggaggcagagtataccactgtctcctcagcccctcctgaggcccctggtcagtaaagatctagggcagggaggggggtgcaatgaggaatgtttctggtctgaaaagaataaagtgggtttgaaagcggattctcagcctcgctgctgttgggccacccgcctctgactggggttgggggacacccatccccatcaagcctaaggccaatccccgtttctgcgggcgggagagcgaggggtggtgagggctggggggcctttttggggcggctgtgaccgtggtgccggagtggctttgagacgggtcgtctgtgctttggttccagtcccgggcacacgggtcactcatcctggatggccttattcttcattcacattttttcttttaaaataaacgttttattttggaactggtttagatttccagaaaagttgcaaaggtgccatagagttctccaaccccttttactccgtttcctcttatgtctcatgggatcccaggtgtgatgggatgggaggccgaggtgggaggttcgctcaaggttagaggtttgagaccagcctgggcaacataacaagaccccacctctacaaaaaaattttcttaggccgggcgtagtggcttacgcctgtaatcccagcactttaagaagccaaggcgggcggatcatgaggtcaggagatcaagaccatcctggccaacatggtgaaaccctgtctctactaaaaactacaaaaatgagctgggcgtggtggtgcgtgcctgtagtcccagctgctcgctactcaggaggctgaggcaggagaattgcttgaacccaggaggtggaggttgcagtgagttgagatcacgccactgcactccagcctagcgacagtgaggctccgtctcaaaaaagaaaaaaaaattcattagccaagtgtggtgatacatgcctgtagttccagctacttgggaggctgaggtgggaggattgctggagcctgggaggtgagctatgatcacaccactgcacttcagctcgggcaacagagtgagaccctgtctcaaaaaaaaaaaaaaaaaatgcaaggaggcaagggagttttctgggcagtgagggggctgtttgaccatgctccgacgagaaatagctactaggtgaggtcataggagcaaaagggtcaaggtcgcctctgagacattccctggaacagtgtgaatgtgagagtcacgtgcaagattccgactgaagcccaagcaacctccagagagcgcccactctgtgccagacgcggttccaggcacacagacacagcagtgaacaaaacaggggaaagtccctgctctccagggactgctattccagggtgggggatagatacaaagtatataattaaataaatgagcagggagatgtcagcacgagataaatcctggggctaaaacacaagggggtcatgagatggagagagcttggcggatgatcagggagatcacggaggaaacatgagaaccgagactcagggccgggcacagtggctcacgcctgcactcccagcacttcgggagtctgaggttagcaaatcgcttgagtctaggagttcgagaccagcctgggcaacatagtgaaactccatctctccaaaaaaatacaaaaattagcggggtatggtggtgcacacctatagtcccagctactcaggaggctgagacgggaggatcacctgagcccaggagctcaaagctgcagtgagctatgattgcaccactgcactccaacctgggtgacagagtgagaccctgtctcaacaaaaacaaaaacaaaaaacacaaactgagactgaaaggggaggaaggaggcgttagtgcaggaaggatattccaggcagagtgtacagcccatgcaaaggccctgcgacaggactgcacctgacatgttggaggaacagccagaagcccatatggcagcagcagagtgagtcagaggggagagggaggagcgtgggaaggggatagggcaggtcgtgcaggccctcgtagagcttagtaaggaacagattttgggccaggtgtggtggctcacgcctgtaatcccagtactttgggaggccgaggcgggcagatcacgaggtcaggagatcaggattatcctggccaacacggtgaaaccccatctgtattaaaaatacaaaaaattagccaggcgtggtagcgtgcacctgtaaccccgggtactcgggaggctgaggcaggagaatcgcttgaacctgggaggcggaggttgcagtgagctgagatcgcgccactgcactccagcctggggacacagagacactccgtctcaaaaaaaaaaaaagaaaaaagaa[141 bp omitted]cgacaccccatttctactaaaaatacaaacattagctaggcatggtagtgcgtgcctgtaatcccagctactcgggaggctgaggcagagaatcacttgaatctgggaagcagaagttacagtgagccaagatcacgccactgcactccagcctgggtgaccgagggagactctgtctcagtaaaacaaaggaaagaaaagaaaagaaaagaagagacacagagacaaagacacagggaagacagccacgtgacaacgaaggtagagattggaatgatgcagccacaaacttgttacctcctctttttatgaagacaccagtcatactggattagggtccatcttaatgacctcatcttaacttgattacgtctgcaaagatcctatttccaaatacggtcgcattcccagatatcagaggtcaggacttcagcatattttttgagaggatgcaattcaacccataacataggggtgagagggaaggaggcccagctttggggaattgccagacctggatttgaagctggctttgctgtttctggctttctttgagatgatgggcatggccatttctctctctgatctctactttatggatatggaaaatggacatcctaacagcacgtacctcatattgttcctgggagattttaaagaggtacttcatgcaaatacaattttttttttttttttgagactgagcctcgtcgcccagggtggagtgcagtggcatgatcttggctcactgcaacctccacctcccaagttcaagtgattcttctgcctcagcctcccaagtagctgggattacaggcatgtaccaccacacctggttaatttttgtgtttttggtagagacgtggtttcaccatattcgctaggctggtctcgaactcctgacctcaagtgatcctcccgccatggcctccaaaaatgcgaggattacaggtgtgagccactgcgcccagccggcaaatacaaaatttaatgtgcttcctccacctctttgattgccacagtgctgggtctcacttccacacctttgcacaggcagttttctctgcccagagtgccctccacatgcctcgctcagcctagctcaacattaccattccttcagtcccttgcacacatctacaaaaaggatcccaaatacgagagtcaagagtcctgggtttaggccaggcacggtggctcacacctgtaatcctagcactttgggaagccacggcaggaagatttcttgagcccaggagttcaagaccagcctgggcaacatagcgagatcccatctctacaaataaatttttaaaaattagccaggcctggtagtgcctgactgtagtcccagccacttgggaggctgaggcaggaggatcacctgagcccaggaggtcaaggctgcagtgagctatgatcacaccactgcattccagcttagcttgggtgacacagacaatctcaaaaaaaaaaaaaaaaagtcctaggttcaaattcccagccctgctacttactgtgaagccccctgagaatgccactaccccctcagagtcttgacttgctcctctgtaaatgaggataacagtgctagctacctatggcagacatgtatttggggccagcagcacggtgcagctgtgggaaactacctgtcttccattctgagtacacgtggctgcaaggagtggggagaagagaccttcttccagattctgggtagtcacatgacccaggcctagccaatgaaaggattgcaccctctaagccacagtgattggttcaggatgggacatgtgatccaagctgggccaatgagagccagccctgggatttgtccaagaaggatcaaaaagaagactcttctggagaggcactggtgcacgtctgtaatcccagcactttgggaggcctaggtggctggaacacttgacatcaggagtccaagaccagcctgggcaacatggtgaaaccctcatctctactaaaaatacaaaaattagctgggcgtggtggtggacgcctgtaatcccagctacctaggaggctaaggcaagataatcacttcaacccaggaggtggaggttgcagtgagccgaggtgcccatcacttacttctcctctgtattagttcattctcacgctgctatgaagaaatacctgagactgggtaatttataaaggaaagaggtttaattgactcacagttctgcatggctggggaggcctcaggaaacttataatcatggcagaaggggaagcaaacgcgtccttcttcacatggtggcaggagagagaagtgaagaggaggaagctctttataaaaccagctgatctcatgagaactcactcactctcacaagaacagcatgggggaaatgcccccatgatctaatcacatcctatggggtcccttgcccaacatgtggggattacaattcagattacaattcaagatgagatttgggtggggacacagagccatccagaccatatcaccccctcagcatctcagcttcctcagctgtcaaatgacagtgactcaaggcagagaccacatacgttttctgcacatagttgcccatgagccctcctatcaccatttgagcttgggggatgtgatgttccccgtttctcccaggaggaagctggcatacagacaggggaccacccctgcccaagtgccacagctaaggagaagctgcaccaggcctcagcatccgcccttccccacgcctggctccccaaacctcctgcctcactggctgtgtcccagcttggcccctgccaggccagatgtccggctgcaaattaaacagatttgctgtccgaaatcagactgcttcttttgtcttttctcccgtcctgctccaaggtctcaggttttatgccaggatagctaaactctcagagacagaaaacattgctgggatggaagatctgtctgtacagggtgatatgtcttgggttggcacatgctacactgccttgtccagcagcccacattctgcctggggctcctggtgactaggggttggaagaagagagagaaacccatgggtggaacacattggtggggatcagacattattgcactgtaccttttcatggacaggcagagaaatgtagcccagagagaggcgggcccagcacatgctcatccagtgtgttggggacaaagacaagattcaaattcatgtcacctgactccggtgggctggcacttccctaagtcttgtctgggtagctcatgagtcaacaaataattggcgcggccaggccaattgagtgagacccagcatggtgtctcactcctgtaatcccagaactttgggaggctgaggcaagaggatcacttgagcccagaagtttgagaccagcctgggcaacatatctagaccgtgtctctagcaaaaaaaaacgaacaaaaaaattaaccaggtgtggtggtgcatgcctgtagtaccagctacttgggaggctgagatgggagggtcacttgagcccaggagttcgaggctgcagtgagctgagattgtgccactgcactccagcctgagcaacagagtgagaacctatctcaaaaacaacaccaccaaaaaaaaccccaaaaaacaaaaataaaaaccagacacacagccttggggacctgtcctcgcacaccactccactcccactactcccacactctgcgctgggtttagattttcttcactggggtgttttgctgatcagcttttaattttactatagtgaaatcggccaattcgttttcttttaggattcttgctccctgtgtccaaagaaacctttgcctaccctgaagccacaaaaatattgtttttattctcctctaaaatttttgtaattcaagctttcatgtttcatctatgatgcatcttgaattgatttttgtgtatggtgtgaggtaagggttagggttctttatttccccacacaggtagccagttgttccagaggcttttgttgaaaatacttgccttttgtcactggatcatctaaaagcaaatgaccatgtatgtatatgttgggggggggggatgtctttttctgtgttctctattctgtttcatggatctatttgtcaatccttatgccaatacccttgccttgtttactgtagctttattagacatagacttcctttcttcttttccttctccttctttcttcttcttcttcttcttcttcttcttcttcttcttcctcttcctcttcttcttcttcctcttcttcttcctcttctttagacagagtcttgctctgttgcccaggccagagtgcaatgacacaatcacagctcactgcaaccttgacctcctgggctcaagtgatcctcccacctcagcctcccaagtagctgggactacaagcatgtgccagaacgactggataatttatttattttttgtagtgatgggatcttgctatgttgcccagactggtctcaaactcctggcctcaagcaatcctcctgcctcgacctcccaaattgctgggattgcaggcatgagccactgtgcccagcctggacatagatttcaaagagcaagatccatgtggtatcagctccatatacagacttccagcaggaccaagggagctgttgggagatggaagcactggtgttttctccagggattcatccatggatgagcattcctctaaagtagcatctcatagcatctttgctcctagaacacacttcattcttgagctgacacccaatcatacttcctgagcacctgggatttgttgattggtgtcatctcatttgtttattcatcacaaatttgctaagcaccttctacgtgccagagcctgtgttgggcactgggacacaaaactgaccacaacaaacccagcccccaccttcgcaaattctgtccagtggaggaggcaaatattgaactatgtttgaacaactgaacaagaatgtttcaaacagtggtgagtcccaggagagaaataaggagataagataaagcgtgtgagaggcaggatcaatcaaagaatgctagaattactgggtgaaagttgagggagaaagaggatatttgcccagtctcaaagtaactctctcatgatatttattcactggaaaagaataaagataactttctggggggaaatctagctggtaccaccttagccaagggatcaaaattaatgcccccagcaacaagacacattgacagtgtgtgcctcctgatctgctgttctgaggggaccacagcaccatctcagtgggatctggacagaaatgcagaatccccatctaatcatgattagacactagaaaagcctgaattgagtgaccttctgtaaaacacctggccagtgctcttcaaaagagtcaaggttgactgggcatggtggctcatgcctgtaatcctagcacttttggaggccaaggcaggaggattgcttgagaccaagagttggagaccagcctggacaacatagtgagacaccatctctacaaagaaaaaattaaaattagctgggtgtggcc[141 bp omitted]gtggtggcatgcacctgtagccccagctgctctggaggctgaggcaggagaatggcttgaacctgggaggcggaggttgcagtgagctgagattgcgccactgcactccaggccgggtgacagagcgaaactctgtctcaacaaaaaattaattaattaattaattaattaaataaaattagctgggtgtggtggtccatgcttgtagacccagctactcgggaggctgaggccggaggatcacttgaagccagaagttgcagcctgcagtcagctatgattacaccactgcactccagcctgggcaacagagcgagaccctatctctaacaaaaagagagagagaaggagtcagtggccggcagacagggtggttgggaacgtcctgtgtgagtaggaggaatttaaactgaagcgtggagagtaaggagacaggatgggagaagatcggagttgcagggggtgggaacaacatgagcacatgtcccatggcaggaggggttggtgtgtcagaagaggagaagagagtgtggctggtgtggacggcaggagtgaagaggtaatggggctgatgatgaagggccttgtcagccacgatgaacagtttgcattttcttgcctgtgcaattcagagcctgttctatttgagttcccccaaagcagccccccagacaaggatttcaggacaagtggtgtatgtgggagataaacccaggaagccctaggaagcgtgtgggaaggtccaagagggaagagaagcagcaaacaggggtgcttttgtgagccaggggcaggtggagttcagtcccactggggaccttggggagcctgtgttgactgtgaaactcagaattgccccacctggccaggtgcggtggctcacacctgtaattccagcactttgggaggccagggaaggcagatcccttgaggtcaggagttcgaaaccagcctggccaacatggtaaaactccatctctactaaaaatacaaaaattagccaggagtggtggcgggtgcctgtaatcccagctactcaggaggctgaagcaggagaatcgcttgaacctgggaggcagaggttgcagtgggccgagatagcaccattgcactctagcctgggcgacagagtgagactccgtctcaaaaaaacaaaaacaaaaacaaaaaacaaacaaacaaaaagaattgccccaccccaaggacaagggatttatgcaaaagccagtgcaccatcggttgggggttgctgggaggagtagtgtgaattctgtgatacttccagcccaccacgggcaatgtcagagcaggcttggacagacagaccgagttggaatcccagcctgcacttccaggaaacagggaggaccccagggatctgagcaggaggccaatggcgtcatgtccagagtccacagagcttcactgaccaatacgggagctgccggctacatgtgaatatttaaagtcattcaaatgaaataaaatttaaaatgcaggtcctcactcacactggccacattgcaagcaccctatagctgcatgggggtggctgtgttggctggcgtgggtctagaacattccacgcatcccagaaagtactaataaacagccctgtgctagacaatgttgatcaagagagtgatacaatcctattttgactctaagaagatctctctcttaagagaaaacagctagttgggagtgcaggtggaagttagaaacccggaaaagtgtctggggcaggtgtccaggctggaggtgataaaagctcagaccagtgcagtagtagtaggggtggggcaaagccatttggaagaagcatcaacagaaagtcctgcccattcagacgtgaggggtaaggggagaggagaaagagaaggggaaacctggactctgatgtgagtgacaggtggagatggtcacccaagaggagaagcagatttggggcagatactgagctgcttctgggccttgctgggtctgaggggtcagagggaactccaggaggacgtgcagttggcagctggactctgatggcggagacctgggcagacatgagaatctgggcccacggggtattttggccacaggcccagctggcaaccgctgggctgtgatgtaacttgtcaggcggaagccgagccccgtccccaggctcagaggcacagcttgcctaaatgctaacaagttttgcctccaaatggtggtggggtgtgcgtgtgtgtatgtgtgtgtttaattctggaatgaatttaattctaattccgccgactttggggatgggaaacagctgtcttaatgagttaacagtgggtttaaaatagcaagcatctgttcgctgtctgagccagcacccgctgaggccactcccaggctgcagggctcagttttgggggggccctggttgcagctctggagatagtagggaacagagggctggcagtcctgagaccccagtgccaggcgagtgtcctgccccctcctgggatttctggtgcctcgtttgtgaaaaccgggcctgttgaaccaccgtgcttgagccagaacctgcgcagggggctatgagcaccatgagtgggccaggctgctgctgcgggggtggcaggtggtaagcccgtccccaccctcctcagatgcttcctggctgagtggccagaaatgcctgtgcctcagttttcccatctgtgaatggagatggtgttaagaagtttagagacattaagacatgtaaagtgtgtgcttatgaccgtgccaggcagacagtcaacactgtgggaatatgtaaagagtgtctaaaaagcaaatacaggctgggtgcggtggctcacgcctgtaatcctagcactttgggaactgagacgggaggattgcctgagcccgggaattcaaggccagcctgggcaacacagtaagaccctgtctctaaaaaaaattaaaaatttagccaattgtggcagcacacacctgtagtcccagctacttgggaggctgagctgggaggacatcttgagcccgggagtttgaggctgcagtgagccgtgatcatgccactgcactccagcccaggtgacagagcaagaccctgtttcaaaacaaacaaacaaacaaacaaacaaacaagactgggcacagtgacgcatgcctgtaatcccaacactttgggaggccgaggcaggaggatcacttgagctcaggagttcaagaacagcctgggcaacatagcaagatcccatctctacaaaaaaatttaaaattagctgggcaggccgggcacggtggctcatgcctgtaatcccagcactttgggaggccaagacgggtgggtcacctgaggttaggagttcaacaccagcctgaccaacatggcaaaaccccatctctactaaaaatacaaaaagtagccaggcgtggtggcacatgcctgtagtcccagctactcaggaggctgagtcaggagaatcgtttgaaccccagaggcagaggttgcagtgagccaagatggcaccactgtactccagcctgggaacagagcaagacagtgtctcaaaaaaaaaaaaaacaaaaaaaactagctgggcatggtggcacacgcctgtggtcccagctacttgaaccacacaaggctgaggtgggaggattgcttgagcccaggagctcaaggctgcagtgagctatgattgtgccactgcacttcagcctgggcaaccaagtgagaccctttctcaaaaaaaaaaaaaaaaaaaacaggccgggcgcggttgctcactcctgtaatctcagcactttgggaggcc[134 bp omitted]gaggcaggagaacggcttgaacccgggaggcagaggttgcagtgagccgagatagcaccactgcactccagcccgggcaacacagcgagactccgtctcaaaaaaaaaaaaaaaacaaaaaaaaaccagaaagtaaacgcagcatccgtcgcttaatgatggggatactctctgaggaatgggtgatcaggtgattttgtcctgtgtgaacatcacagaatgtgcttacacacttctagatggtagagccttctgcacacctacgccatacggtatgcttgagagcctagtgctctcaagctataaacctgcagagcatgagactgcattgaacacagcaggcaactgtaacacaatggtaagtactgtgtctctaaacatatctaagggccgcgcatggtggctcacatctataattccagcactttgggaggcctaggtgggcggatcacctgagattgggagttcgagaccagcctagccaacacagtgaaactgtctctactaaaaatacgaaaattagtcgggtgtggtggtgcacgcctgtaatcccagctatttgagaggctgaggcaggagaatcgcttgaatccgggaggcggagtttgtagagagctgagatggtgccactgcactccagcctgggtgacagcacgagactctgtctcaaaaaaaaaaaaaagagagagagagagagaagctgaaggtgtccaggtgcccacaaatgcatccagcctagtgctcacctgcctgagggggtctggggaaggggggagcctttgccccagcagaaggaaggagttggtgtccacggctgcaccttcgcaagggggctggctgtgtagggggaaagttgtcggtgatagggggtctgagtccacgactcagctcttggagaatcctggagacccccatatcattagagaaagtggccagcaccctctcctttctcaaaagattaacagacactcagctgttcatttgatagtgtggggatttacagcccagtcttgggatcagagagacccgggtccagttcagcctctgaaacttcttgactgtgtgaccttgggtgagtgtgtttacctctctggacttggacagtcctgggttcaagtccctgctcatcagccacatgatctgtcctcagtttccccttctgaaaagtgaaatgcccatagtcactgagctgtctaaagcataaaacaagatagcccaccccagccctccagatgtgctgtcattgtgtttattatttatttattcattgattgagatggagtctcgctctgttgcccaggctggagtgcagtgacgccatcttggctcactgcaacctccacctcccaggttcaagcgattctcctgcctcagcctccagagtagctgggattacaggtgcccgccactgcacccagagaatttttgtatttttagtagaggcggggtttcaccatgttggccaggctgatctcaaactcctgacctcaggtgatccgtccacctccgcctcccggagtgctgggattacaggcctggaccatcgcgcccggcctatcattgtgtttaaagtccacagctcctaattgctgaaaaagtcaaacacacgcttcccctatgacccagccacgcctctcctaggtatttatttacccaagagaaacgatgcctacatccacaccaagactcgtacagacttgttcagagcagctttatgcataccagccccaaactggaaataatccaaatgtttacccacaggtaaacagataagcaaacagtggtccattcagaccacagtattctgttcggccataaaaaggaaaagggcactgattgacccaacagcagggctgagcctggaaatcagtaatgctgaggaataaaagtcagacgtaaaaagagtacgcactggtgacatccagaaaatgcagactcatttataggaaccctaagcagaccagtgggtgcctggaaagggttggggacaggaaggaggggaaggagggggaggggttacaaagggagtaatgtattcattttgttggtgatggacatgttcactgtttccattatgcagatggctttatggatatatgtgtctagataatccactccccgcaaatgactcctggctgcctggccacaaccgtcctgtgcctcattttcctcatctgtaagcagagatgttgttaaaaagtttagaggctgccaggcgcggtggctcacacctgtaatctcagcactttgggaggctgaggcgggcagatcaccagaggtcagaagttcgagaccaacctggccaacatggcgaaatcccatctctacgaaaagtacaaaaattaggcatggtggcgggcacctgtaatcccagctactcgggaggctgaggctggagaatcgcttgaacctgggaggcagaggttgcagtgagccgagatcctgccactgcactccagcctgggtgacaagagggagactccatctcaaaaaaaaaaaaaatgtttagaggccacgcctgtaatcccagcactttgggaggctgaggtgagaggatcacttgaggtcagaagttccacaccagcctgggcaacgcaacaaaaaacagtatcgctacaaaaaacacaaaaatttaattagccaggcatggtgatgtgcacctgtgggcctagctactcaagaggctgaggtacgaggatcacttaagcccaggaagtctaggctgcagcgagccgtgatcgcgccacagcactccagcctggacaacagactaacaccctgtctcaaaaaaaaaatttttttaaaacctcactttacctcagtaaaactataaacacacaatacaagctcttcctccaaaaatacctagcctggcacccatcatgcatggggtacccactggattggggacttcatgaccttaatggagacagggaccagtgtggggtggaggagaacttaggagaagctcccacttcctttttttttttttttttttaaattgagacagagtctcactctgtcacccaggctggagtgcagcggcgcgatcttggctcatggcaacatccgcctcccaagttcaagcaattctcccgcctcagcctcccaagtagctgggattacaggcacacactgccacgcccggcttttttttttttttttttttgagacggagtcttgctctgtcacccatgctggagtgcagtggtgtgatcttggctcactgcaacctctgcctcccaggttcaagcgattctcttgccgcagcctcccgagtagctaggattataggcgcacaccaccacgcccggccaattttttgtatttttagtagggacagggtttcaccatgttggccaaggtggtcttgaactcctgacctcaagtgatctgcctgccttgggctcccaaagtgctgggattacaggtgtgagccactgcacccaggcagctcccacttctcgaatcaccctcccccacatctataccccactaccccgatccctgggaaaaggaatctgggccccgtcagccttcgcctctcccaggccacaacaagtaatttctgaacgttgttcactctgccaacaagagacaagattaattatggccataacacaccaggcgccgcctaaatctttcatagatccatgcgcgcactcacacacgcctgcacacgctcacacacagcctgcggctggctctctcattcctctggattttgcatttctttgaaagatgctgcaggtggacacgaggggagatgcctcctctccctccttgtctctttcacctgcctgagcggatcttggggaggaagggagctttcgccccagcgagaggaaggagtcagtgtccacgggggcatctttgcaagggggttggctgtgtagggaggaagttatcagtgatagggggtctgggaccatgacccggctcttggggtaaacctggagatccctgtgtcattagggaaagtggccagcaccctctcctttcccaaaagatgaacagacactcatctattcatttgacagtgtgagggtttacagaccagtcttgggaccagagagaccaggtcccattcagcctctgaaacttcttgactatgttgtgtgatcttgggtgaatgtttttaacctctctgggcctcaattttctcatctgcaaaatgggggtaataatattaatagtatcctatgtcgtggggttgctgtgaggcctaaagcagatctaaattccttagaaagttctcagtgtagggccaggtatacagtaggagttcaatcaattagctatcatgagagttttttgtttgtttttgacacgtagttttgctcttgtcgcccaggctggagtgcagtggcatgatctcggctcactgcaacctccacctcctgggttcaagcaattctcctgcctcagcctcctgagtggctgggattacaggcatgtgccaccacgcccagctaatttttgtatttttagtagagacagggttttgcca[138 bp omitted]tcacctcctgtgctcagatcttatttcttattttttcatccttgcattttatatatggaggctcaaagccatgaaagggcttagtgagggactcatacaccaggatgtggccaaaggaattccgagatgcctcagtgatcttgagacctcttctgtttgccagtgaggaaactgaggcccagagaggggcagagttgactctcaggcctctacttcccggctcagtcctgggtctcttgaactccagatattcccagtcacatccctgcctgtccttggtactgcagccgcagaagctgcctgcctgcaatttaccaaatgtgacagcatcttggccccagtagtgcaacccaagccagtggcatctgcggggctgtcacctcccatgccaggtctgagtgatggttggagggggtgagagacaaacacttactgtgtgcccgagcccagctggctaggtgcttctgcagacttggcggatgactgaagacactcagtgaccccaaggacaagtggcacatgaccccattaggcagatgtggaaactgaggctccaggatggatggaaacactgcaggattccttcccgctggtgggccctggaccgggggttgcagacttagctgtgagcaaaacagacctggcccctaccctcctgggctctcatggcatggggaagatgagccctgagcattaacattataaatagttattagtggctcacccctgcaatcccagcactttgggaggccgaggtgggcagatcacctgaggtcaggagctcaagaccagcctggccaacatggcgaaacctcgtctctactaaaaatacaaaaattagccgggcgtggtggtgcgcgcctgtaatcccagctactcgggagggtgaggcagaagaatcacttgaactcgggaggcagatgttgcagtgagccgatattgtgccactgcactccagcctgggtgacagagcaagattctgtctcaaaaaaaaaagctatgcagtctgctgggtaatgaatcctatgaaaattaaagcaagaaggggcatggggtgccagagattccatggaagaaagtgaaagttagaaactaaggtgggcaatgtgtcagggaggcctcactgagcaggtgacatctcagcagatacttgaaagaggcagggagggagccgtgtggtgactggagaagagtgttggaaacagagggcacagcccgtgcaaagaccctatggcagaacctcgcctggcatgttggaggaacagcgaggaggcccatgtggctggagcagagtgaggaaggggagacacggagggagggaggggaggggagggaggggacgggccaagtcatgcagggctttgcgggctgcagagaggacttgggctttgactctgagggaggcgggagccatggagggctgtaggcagaggagggacggaacctgattcaggtgtccacagagtgaaggtggaggagggtgggccactttagcccaggtagtctgggacggctactctaaagaggtgaccttggagttccagttgagtggggagcagccttgagatgctctagggcaagaaagggcattccaggctggattgcttctaaaaagcttggcctatttgaagaatgccagacagacagtgtggctggagtgagctgggaggaaagcagaggagaaggacctgattgggggttctggaccccccagaacactgaagacaacagtgacagctttcattattatttctattattattattttgtagaaatggggtcttgctatgttgcccaggctggtctcgatctcctggcctcaagcgatcctcccacctcagcctcctgagtagctgggacctcaggcacatgccatcacacccagctaatttttttttaattttttgcagagatcggatctcgctatgttgcccaggctggtcttgaactcctggcctcaagcaattctcctgcctcagcctcctgaagtgcagggattacaggtgtgaaccactgtgccctgccagagccctagagttttaatcttgatctaaggaaatagcaagtcatggcagggctttcagcaggggagggacaaaatcagatggacagggtggtgcagcagacagaacaatgccgcccaaagatgtccacatcctaattcttagaacagaatccttagactgtattatgttacatgatgtagtgggttgaaaagcacactcctaggccgggcatggtggctcagcctgtaatcccagcactttaggaagctgaggtgggggcggatcatgaggtcaggagttcgagaccagcctggccaacgtggcgaaaccccgtctctactagaaatacaaaaattagctgggcatggtggcatgtgcctgtaatcccagctactcaggaggctgaggcaggagaattggttgaacctcggaggcggaggttgcagtgagctgagatcatgccactgcactccagcctgggcaatggagcaagattccgtcaaaaaaagaaggaaggaaggaaggaaaggagggagggagggagggagggagaagcacgctcgtctgccccatcaaattcacgtccatccaaaatctcagaatggcattgtatttagagatagcatctttgccagcctggacaacacggtgaaaccctgtctctccaaaaactacaaaaattagccgggcatggtggctcgcaccttgtagtcccagcttactcgggaggctaaggtgggaggtttgcttgagcctgggagtttgaggctgcagtgagctatgattgcaccactgcactccagcctgggcgacagagcaagaccctgtctccaaaaagaaaaagaaaaaaaaagaaatagggtctttgcagatgaaattatcctggatgtagagtggcccaaaatctaac[135 bp omitted]cccatctctactaaaaatacaaaaaattacccggatgttatggcgggcgcctgtagtcccagctactcgggaggctgaggcag[153 bp omitted]gaggctgaggggagaggatcatttgaggccaggagttcaagaccagcctggacaacatagcaagacctccatctctaaaaatacattttttaaaagaataaaatgaagcaaaataaaccccctgccacaatcctgttccctggggtgaccccccttgacgttctggtgtggatgcttctggaatgttctccggtgtcattctgctctgtcctccggcccccacccacgtgtccaggatgtgagtcctcgtccgctaccacaccagacctcacccttcatcacggctgcatagccttccttttcagggatgatagaggtcacctgccccccagtgacgggtttctggtcatttctggttatttgtctgtcaacgctgaagtgaaggctgctggacgcatctctctgttgctctaaaaccctaacttacagaggcccagtctggtttatttttaatcttttctttttttctttttctttttctttttctttcttttctttctttttttttttttttttttgagacggagtctcattctgtagcccaggctggagtgcaatggcgtgatttcagctcaatgcaacctccacctcccaggttcaagccattctcctgcctcagctcccccaagtagctgggactacaagcgcacgccaccacacctggctaattttttttttttttttttttttttagtagagacatgtttttgccatgttgaccaggctggtttcaaactcctgacctcaagagatccacccaccttggcctcccaaagtgctggcattacaggcatgagccactgcacctggcctgctttctttggaatggtctgctttattttgaatttcaagcgattctgctgacacgaggcgcagacagagttggttctgagtcccctggcccttcgccagtgccctgagccaagggagggtacagggctctcttcctccacctccaggccaccactctgcccccctccaacccattcccccaacacagacagtgggatctgtttattcataaagtagatcacgtccctctcctactcaaatccctcccagggatccctagtaccacttgaataaaacccgaagtcctccccacagcccgtaaagccctgcacaccttgccctgtcccttccctactttgccctgtcccctccctgccctctcctcctcctcaccccctcctctccccctcctcactctgctgcagccacacgagccccctcgctgttcctccaacacgccagggtctgtcctgccccagggccttggcactgatggtgcctcctgctcacccccttgtccaggcaaacgcctcattttgcaaatcacagctccaatatcatttactcattccatacttacggaggagagaaagaaagagagagaggctggggtgtctgagagaggatgtcggaggggaaaagctaggcagggggctggaggggaggggcggggtgtggacaggcttgcaggggggcgtctcggaggctgatgaggcagctgggacagaggtgggggcggcggcccccggatgtgtgcagccccctgccgcccacccccccagcagcgcgctggctgctgcccgtcaacactcgccagagatgcgggaaatattttctctccggctgacacttttggcaaaatacaattcctccagcttttttccgtgcaaaaaacatgtccatcaaacccgtccctgcggcgcctgtggaagagggaggccgctggattgggtccgggaattgcgggaatggctccggggagagatggcagcctccccgccccgctctctctcgctctctctgcagtcagaaggcgacataaaaacagtaagaaaaatagttaaaagcccaccgcgtgttcagtcagcgctggactttctcctatctatgcctgctccatgtgcctgcacaaccctactgctattagccccgggtttccgataagaatgctgagcccagagaggggaagacgcttccccaaggtcacacagcacagttgggatttgaattcagatcctacatgacctccccaggggtgcctcgaagagcctctactgaggagggagaggaaaggaaaagcaacggacaccagagggatcagcagatgtaagagtttcaagcaggcttcatgcaatagctcctgaagccctcagttaaatcctctgtagccagcagccctcagttaaatcaagatgtgactgtggctttcccaactgcctgtatcatcctttcacatgctagtccccacaaacccctaagccagggacaactgtggcaaccacagcaactggctcagaagaaaagaaataagaataaagtttggaagctggcgacacccagatgtcccctcctttcttacccagagtaggaaaagaggaggccttcagtaacaacggtcttagacatgagagagaacatccaccaccatggagattcaaatccaaactgcacccctcacctcctggtacactcagcccaaccatctcaactctgggagccttgaggggttgcaatgtagataccagacatataaaagctgcagtgggccgtgcttaagtggtcgagaatgtcaaatgtgagcctaacagcccggggttcgaatcccagctctgctgctttctcgctgtgcaaccttcagcaagttgcttgacctctctgtgtcactgtttccctgttggtaaaagggacataaaaattcctgcctcccaattttaaatatgttgatgttccaaaaacacatgggacggagcctagcctacaacaggtgcttatacatgtgggatataatattattattattattatttttgagacagtcttgctctgtcacccaggctggagggcagtggcacaatctcaacttactgcaacttctgcctcccaggttcaagcgattctcctgcctcagcctccccagtagctgggattacaggcacctgccaccacgcctggctaacattttgtatttttagtagagacgtggtttc[144 bp omitted]acagggagagccgggacgatgtcctccctccccgcccacccaacccagggaagggcagcagggagatggctctggtcccagagccccagccaccggcggctccctgggcgagggattgacttttctagaatgttttgcccctcctcccagtttccatcaggagccagcgcggccgcataaatcccgctttacggctgttattgacgggggagcagagagagcagccccaggaaggcccaattaattttcccacctggcatctgtgcgccagacgaatttctgaactgctgcagggaggggcagagcgagctggggaaaggccaggctgaggacaaggtcgtgggcaggccgggatatcctaggctcttagcttcagagcactgttgagggagtcccaggctctcttgtctgaagggtagaagtggagggggctgtcaattctgagtagggcttgaagctttcagttaggatgcagatgagggtttcactgaggagacactgaagcaaagacacaaaggaggctagggaggctgccacatggcttttggaaggaacagcttgccagcagagggcacagcctgtgcaaaggccctgaggcaggacctcacctggggtgttggaggaacaacgaggaggcccatgtggctggagcagagtgagtgagggggagacaaggaggaggagagggcagggaggggctggggcaggtcgtgcagggcctggtaggcctcggggaggacttgggctttgaccctgagggaggtgggagccattgagggctgtgggcagaggagagacgagatctgacttaggtgctcacgggcgccctctggctgctgttcagagaacagttgtgggattcacagggaaaacaaaacccagttactaaattctcccaggtccaggtattggctgggatctgtaaaccagagaccc[132 bp omitted]ctccatcactatttccaaaactttctcatcttcccaaattgaaactccatctccatgaaacactcactccccacccccctccccagcccctggcactccccatcctacgttctgtctctgtgaatctgatgactctagggatctcctaggagtggagtcacacaagatttgttcttttgtgtctggcttctctcactgagtgtgatgtcctcaaggttcatcaatgtcatcgcctgtatcagaatttccttcctttttaaggctgagtaatattccattttatgcatagatcacattttgctcatccattcgtctgatgaaacacttgtgttgtttttggcttttgcctatcgtgaatcatgctgctatgaatgtgagtgtacaagtatctctttgagactctgctttctatcaaattttgtttgattttaattaatttaatgtaaacagccacccatggctagtgactgccatattggacagagtggctctgcagaatggaaagagaatagaagagaatgaatttttttctttcttcagtgtgattgaattctctgtctgggccaacgaatggcaggcatctcatgagtcaatgacagttataagtgtcccacactagaaccaattgtccagggcagacacatcccaagagccagggcgaccatggaaaagcccctgcctaggatgaggtcccatggtcctgctgctttcttctgcccaagggcaggtggtctggatccaacaggcttggggacaagagccaccatgtccttagccacccctttctggctgttgctgcacagccctgcttacaagagacccaaggcagccacacctcaccccatggccatgggcctcatgaaggtggtgcccagggagatcgggtgggagatctgggactccttggattgcacctgtgctgtagaagagccttgaaggaaatgtttaaatggaggtgtatccattagctattgctgtgtaacaaagtacccacaaacctagcagcttcaagcaacacatttattatctcacagttcccatggattgggaatctgagcatggcttagctggggcccctgcattagggtttcttacaaggttacagttttggtgtcaaccaggactatggtctcatcagaggctcgactggggaaggatccatttctaagccttctcgggttgctagcaggattcatttccttgtggctgcaggattgaggtgcctggcttcttgccattggctgaattctgctctcagcttcaagaggctgcccacagttccttgcaatgtggtccccaccctgggctgttcacaatgtgaccatgtgccagtaagagagaaaaagagtagtgagattgctagccagatagagtcttatgtaaggtaatataatcatggaagcaacattctgtcacctgtgctatatactgttgatgagaaacaagtcacaggtcatgcccacactcaagagtagggaattatgcacaggatgtgaacaccagaaggcaggaatcatgggagccactttaggatctgtctgccacaggagataaagagagcaagagttttcaatggctctgggccccaaggggtttctgggagacagggaaggaagaaaaggaggggggaaggaggagctgagagtaagagagattgggaattgggaggaagggaaaaagaaagacattaaattccatctatatctgtggtgccccacttttgcccagccttgtacccagaaaagtaccagccctggatttttctatgtctagcacagatactcccagcctagtctgacatttgctgtgataagggaggttggaaaaggttcctgatccaatgtggggttgggaaaggtatcctggaggaggcactttctgtgctgatccccaagtttgagacagagccaatgggtgagaagggggagtgggttcttgctggagagaccagcaagaacaaaggcccagaagcatgaagcagagatgtatgttcacaccaggagagcagagtgataatacaagagggtggaggaatgggtcattactttgcctcttagggaggtgatgttgtacccattgtacagatgggaagactgaggctcagagaggtgaaaccactttctccaggccacagggctaagaagcggagcagcctcattcgtaaaatggatgtttgaggtcctcattagatctcacatcctggctctgaggcctcctttgtgactcgggatcaaaaacaagaataataataatagcagcagtatttgttgatcactttctatgtgctaagtgctcttgtaaatgctgtacttcagaagtcagccagggacaaatacagtccaacacctgtttttaatttttttttttgagacggagtctcactgtgtcacccaggctggagtgcagtggtgcaatctcagctcgctgccagctccgcctcctgggttcacaccactctcctgactc[176 bp omitted]ccggacaacttttttaatagttgaaaaaataaaataatattgtggtgctgaacacagtggctcatgcctgtagtcatgtcagtgtttagggaggtgaggcgggaggattgcttgaggccaggagttagacaccagcctgagcaacatagcaaaaccccatttccaccaaaaatttaaaaattacctgggtgtagtggtgtgagcctgtggtcccagctactcaggaagctgaggggagaggatcccttgagcccaggagttcgaggctacagtgagctatgatggcaccactgcgctccagcctgggtgacagagcgagaccccgtctctaaaaaaaagaaaatagtaaacataaaataaaataaaataaaaacttgtcttttgggacacatgaaaatatgaaattccaatgtcagcatcaacaaataaagttttactggcatgcaaccatgctcatttgctcagctatcatctatgactgcttttacacgactggcagagttgactttctggccaaaacttttgactttctggccccttacagaaaaagcttgccagcccctgctgtcatgtgttcactctttgcaacagccccatgagttagatgctgtgtcttccttcatttatacagatggggaaactgaggcatacaagctgaagtggctcagctaaggttatagtggataagtgatcaagcggggatttgaacacaggtctgttggactccccataaggtgctctcactgctgtgtcatgccttcttgcccagcccttggtgcttaaggctgggagtgcctgagtctagctctttctctccctagcctaggatccctccagagggctgggctctgcactgagccttagcagaatcccagcatccttggacccggggaggtgcgccagtcagcaaagtgcccaaagcaagctccagaatccaccttgccccctcctccagggcccatccgggaaggcagccagttaagcgcaaatcaattaaacaaactccatgctgcctgccgccctcatattctgacctcagccaagaggctcgcattccagcctggcggacttgggtccaagcaaatgcacttgtgggaggatctgagaaggggctgcaggatcaggaatccatacaaagaactccagcctggccccctgggagcctgtgatacttagtttgtataatctgatcccccttggggaacatggtggggaggtactgtgtgagcaaacgcggggaggggggaacctgtggaaacaagagcctgttctgcagaagatgagctgctcagtgtgacggagagtgcaagggaacagtgagaaagaagcctataatttgctcattgtatgtgtcaatcaagcgatagaggttgctgtttcttcgttgcatgctatctgagagatttgacacctgaaaaggaagtatcaaaatgcaggctctccctgctggactcaaacctacagccgtcttgtaagggcctgaagacagagcagagacactaagaaaagggggcttctggatccagccattcctgaagtccatatacccctggacttttcactttacaacctgacatttatgtatatggtgtctgcatggtaattaatagtggtcttgtcaaatatttcttgatctttaccttctgaaacatagaagactagattattcttcagcaaatttcattcaacctcttcccaaagtttacgggagaaatgcccttccctgacccactgaggccatcccagctacgtgacttgctttggtcaaggcaatgtgagggaatgtgacagtgtgccaattctgcacttaggtcttcagagtcactgcatgtttctacatgacctctcctgctccaacctttagccctgggtcaaaaatgccttgaaaagccactaagccaaggaagataaaaaaacacatggacccggcctgacccaattcacagggtagaactgagcccagctgatctgcagatgtgagaaggagaaataaatgctggtcaggcacagtggctcacacttgcagtcctagcactttgaggggccaaggtgagaggactgcttgaggccaggagtttgagaccaacctgggaaacacagtgagaccttgtctctacaagaagataaaaaattagccaagtgtggtggcacatggctgtagtcccaggtacttggaaggccaaggcaggaggatcatttgagcctgggagatgaggctgcagtgagctatgatggcaccactgcactccagcctgggcaatgtagcaagaccctgtctctacacacacacacacacacacaaattttttttttgagacagagtctcgttctgtcgcccagtctggagtacagctgcacaatctcagctcattgcaacctccacctcccgggttcaagtgattctcctgcctcagcctcctgagtagctgggattacagacacgtactaccacgcctggctaatttttgtattttgagtagagacggggtttcacc[139 bp omitted]acctctggtcctaactacttgggaggctgaagcgggaggatcacttgaggccgggagttcgaggctgcagtgagctatgatcacaccactgcactccagcctgggggaacagagtaagaccctgtctctggaaaagaaaaaaagaagtgcttagggttgtatgtcaaagagatttggtggatgtcatagctacggctattacatgagcacagtttgggattgaacttcctggcttctgcaatgggttggattgagtgggaatgtaggatgggttctagacaacatggtgaaaccctgtctctactcaaaatacaacaattagctgctaatgaaataccctccagaaccctgttttcttctgccacagaaatcaacaagttccaggcagtgactgctccatcagccagggtcctggagggaagtgataatcttcaagtccctggcccaaaaggtcacaattgcatatacaatgtgagtgagaaataaactttggatgttcttagcctctgaggcataggggctgtttgattactgcagcaaaaccaagcctatcctaacagatacaacaggaatggaggcttttgataccacagaaaaaggtggcagacagtggcatagatcctaggcaaaaaggaagactccagaccctaactggtaacatttatcaagtccttgctgtggtccaggtgctctgcacagcgcttcttttgagagtttacatgcttacattgaatttgcacactcatgctatggggtaagagctgatttttttttgagacggaatcttactctgttgcccaggctggagtgcagtggcgcgatctcagctcactacaacctctgcctcctgggttaaagcgattttcctgcctcagcctcccgagcagctgggattacaagtgtgcaccaccacgcctggctaatttttcttatttttagtacgaacggggtttcaccat[131 bp omitted]aggaaactaggctcagggagggacataattcactcaaggtcacatagcagggaataggtatagctggaatttcctgccagacctgtctgattgcagagtctgcctttgcccacaatccaccttcctcctggccatgatacgacgttccaagggtctgcagccacatggtttatcatctccaccaacgggacttgagaccacaagagaaaccacaaacctcaagccctaaagcttctcaaactcacctgttgggatttaaatctttcaaggagacctagtagctccccagagtagcctcatagagccaccatccccatgcttccagttccttctatgatctcaccattattacatgggggaagatttctctctctcttttttttttttttaagagacaaggtcttgctctgtcacccaggctggagtagtacaacggcacgatcatagctcactgaagcctcgaactcccaatctcaagtgatcctcctgcctcagcttcctgggtcgctgggactgcagatgtgcaccaccatacct[131 bp omitted]cctcagcctcccaagtagctgggactacaggcgcccgccaccacacc[242 bp omitted]cttcagcctcccgagtagctgggatcacaggtgtgcaccaccacacccagctaatttttgtattttcacggagatgaggtttcaccgtgttggccaggcttatctcaaactcctgacctcaggtgatctgcctgcctccgcctcccaaagtgctgggattacaggcatgagccaccacgcccggcctacctggctaatgtttaaattttttgcagagatgtgttctgccgggaaaaaaaaaaaagacacacctttacgttgcccaggctggtttcaaactcctgacctgaagtcatccttccactcagcttcccaaagtgctgggattataggcacgagccgctgtgtacttgccatcgtggggggattttatatcccagacacccagaactgccccttagcttctgttttttttttttgttgttgttttttttttttagacacagtcttgccctgcacgtcaggctggagtgcagtggtgccacctcggctcactgcaacctctgcttccccggttcaagcaattctcctgcctcagcctcccaagtagctgggatcacaggtgtgcaccaccacacccagctaatttttgtattttcacagagatgaggtttcaccgtgttggccaggcttgtctcaaactcctgacctcaggtgatctgcctgcctccgcctcccaaagtgttgggattacaggcgtgagccactgcgcccagcctgaaagcatcatcttttcttttttccttccatagcatttctcaccttctaacacaccctgccacatacctacttgtcactgtattccacggg[133 bp omitted]atggagaaaccccgtctctactaaaactacaaaattagccgggcatggtggcgcatgcctgtaatcccagctactcgggaggttgagg[131 bp omitted]aacgttttcaattgctatctcatttcatcatcaccatcatcacgttgtacagatggggaaactgaggcccccaaagggacagagggtttttcaaagccaccgatcaagtctgaaatcgactcccctgtcctgaggtttgtctccgccctgcagcctccatcccccagttccaaatcagggcaccccggacattccaggactggcttcaccctgacatcgagctctggccgagctccctcgtttggtgaaaatctaatcacgccagcctgaatgctgacatcgaaatgactgccgagcccttgactcggggtaattaggagcattttgggatgccttgcttgattaaaagcagatcacccgttcagaatgaaaattcaggaggcagattgcttttgttgttgccacgatgctattttaaacccacgcagctctccagctaataaagacccgtcaatcggctgtcggggtgttcaggacgaactgtctgcagggttcccccactgctgtttaccacagcaccacagcccagagggacccctgtcaggacatcagagccagcagggtgcaggttgacctcagtgtcactcccaaacctctcagggttactccccgtgtctgcctggtccctgaaccagaaagtcagatgtcgacctggtctcttctcgccctcatcccctccccagatcctatcccacctgtccccaggaccccctcctgcccggattccagttcctggctcctccctggcctctagcctcccatccgtcctccccagaaagctccttttttttttttttttgagacagggtctcgttctgtcacccatgctggagtgcagtggcaagatcttgactcactgcagcctcgacctcctgggctcaggtgatcctcacacctcagcctccagagtagctgggaccataggtgcatgtgccaccatgcctcatttttgtacctttttgtatagacagggtttcactatgttgcccaggctggtctcgaactcctgggctcaagtgagcctcctgcctcagcctcccaaagtgctgggattacaggtgtgagccatcgcacccagccccaagaaggctccttctaaggtttgctcagcctccctgtgctttgacttcacccaatgaaccacttcttattcttccagactcagtcacctcctctgacctccaggctggcccagagaccccctcttttctctaatcacccaggtcggaaccaccctttcctgggtccgcctcctgcctggactgtgagccatgtgtggatggggtcaggtctgtggtgctcactgatggttctccagagcccagcacaggt[146 bp omitted]accccatctctactaaaaacacaaaaattagccaggcttggtggcatgcacctgtaatcccagctactcgggaggctgagacaggagaatcacttgagcccaggaggcggaggttgcactgagctgagatcgcgccactgcactccagcctgggcaacagagactccagtaaaaaaaataaataaataaaaataaaaatactgatgaatgaaggaatgaatgcatgcatgcattggggtgggaggtactaggaacaccctggatctcaaggtatcgggacctcaaatggcccatctctctgccctgaagcacccccttctgccagtctaggtcctgacctgcaccccagccagggggagggacagaggcctccctcagagactcagccttcagctcatgatttccccagcagaggaagggacaggacagccccttagcctgaccccttccccaccccaacccccaaagacaccaatatgtccacatcacatagatgcaggcattctgtccgaccccaggaacagataatccaatgccggggagaggatgggggtgggctccagggctgggctccctgtttttcaggggccagtggctgggcatggagttggacgacagagaaggccctggaggccaagggaaaggattccagcagaagatgcgggggagggctgcagtgggaagtctgtcctgtagtctaaccttgggccggggagtgatgtaacacagcggttctccttgtgggtgattctgccccccaagggacacttgaccatgtctgggggtatttgtgcttgtcacctctccgtagcgggggtgtgctgctggtatccaatgggtggaggccagcgatgctgtggcacaacctaaaacgcacaggacactccccacctcagagagtaacacagccccagatatcagccatgccatccgggcgcggtggctcacgcctgtaatcccaacactttgggtggctgaggtgggaggatggcttgagcccaggagtttgcgaccagcctaggcaacatggtgaaaccacatctctacaaaaggaaaaaagtacaaaaaattagctgggtgtggtggtgcatgcctgtggtcccagctactcgggaggctgaggcaggagaatcgcttgaacccaggaggcggaggttgcagtgagctgagatcatgccactgtactccagcctgggccacagagtgagcctccatctcaaaaagaaaaaaggccgaaggggagagcatctaatgtcagctaacacttagggacacccactctggcccaggcttttctgggggctgcttgaccaccctaacttcccgtgaggtgtgcatgaacatcattccatttccagatgtggaaaaccgaggcccacagcagcaaagccacagccccaaggtcgcacggtgtgtttgaaggtcagccacacgggggcaaggaattttgtttctggctaattcactgctgggtccttggggtcctagaatcaggcctggcacatagcaggtgctcaggaaacactgaatgaatgaatgaatgaatgaatgaatgaatgaatagcagagctgggattcagacccaagctggtggatgccagagccccccactcgcagccctgggctcggagggggggacttctgctgccctttatgtccctgcaaccccctggactgctgagccccacgggccaggcgctgtcaggatcctggaggccgcagctgatgtttaaagtccctattgtggttcctgaaaaaggagcaggtgttggcagcttggcttcgccaaggaggccctgcggccggcgcctttgtcccttgagctggtaaaatcctctgctcggccgctccattcaacccactcaattccacgttccactttcacccccgtccacattcttcgcctgcaaatcccccattctgagcggctgggcccaaaaggcgggcgtctttgttcgtcttttcttgtcctcctctgcccgttaatctaatcgcttcctctctgagatgcgggaggaaggagaagggagggaggaaaataaacaaatactgagggtaaaagaaaagattcgccgaggtttccattgaaggggatttcgcctgccactttgagatattgacaaaggctggtggggggcgaggggaggcttgcggcggggaagtcgggcactgggcgggtggacctggctcccggcgctgcattgagatattcagaaaaacaaattcatctggcctgtcttcctgacagtttgactgccagacactggtaagtccaggccaggggagacagctgtcaaccatcccgagctgaagagtttgggaaggaaggcagagaccaacggggcccattcccctctctctccccgatttgctgtgtgaccttgagggacatgcctgctgtctctgtgccttgtcactaagaagcggccctttatgtccccactttggagggatggaggattcaggggtgctcagagagtgaaaggtgtttgcacaagtttacccaatgctgccgaagcaaactcctggtttagggccccttcccaggacgagggaggaggggagagggctagaggctggtcagagggtccagatggagctcaaaagccgtcaacccaatgtcatcccacagggattcccaggtgactgagggaccctcttctgtctgagtcctcggccttttctgtatactaataatcttgtttttctttttcttttttgagatggagtctccctctgtcacccaggctgaagtgcagtggtgtgatctcggctcactgcaacctctgtctcctgggttccagcgattctcctgcctcagcctcctgagtaactgggcttacaggcacctgccaccacgcctggctaatttttgtatttttagtagagacaggtttttgccatgttggccaggctggtctcaaatgcctggcctcaagtgatttgcctgcctcggactcccaaagtgctggtgctgggattacaggcgtgagccaccacgtccggccaagacgctatttctttaaaaaaaaaaaaaaaatcagcaggtgttgtggtgtgtgcctgtggtaccagttactcaggaggctgaggtgggaggatcacttgagcctgggaggtcaagactgcagtgagccatgatcgtgctactgcactccagcctaggcaacagagtgagaccttgtctctatttaaaaaaaaaaaaaatagatgatggccaggcacagtagctcactcctgtaataccagcactttgggaggccgaggagggctgatctcttgagatcaggagtttgagaccagcctggccaacatagtacaaccccgtctctactaaaactacaaaaaaattagccgggcgtggtgccacacacctgtaatcccagctactcaggaggctgaggcaggagaacagcttgaaccccagaggcagaggttgcagtgagccgagatcgcgccactgcactccagcctggacaacagggcgaga[134 bp omitted]tgaaaccccatctctactaaaaatacaaaacttagctgggcgtggtaggggggtgggcgtctataatcccagctacttgggaggctgaggcaggagaatcacttgaacccaggaggcagaggttgcagtaagccgaaatcacgccattgcactccagcctgggcgacaagagcaagactcggacttaaaaaaaaaaaaaaatgcatgaaaagcccaaggtttggtgcataaagagatggcagaaatcaaagtctcagagatttcgtgcaaaacttgcccccaaaggatcctgcaatcccacccctaggcttttattttctttgatgatacacgtgcctgtgtccctgggtggggaatcttgctattgttaggaaatgaaacgccaccgcctgagcttgattgcgttcttcccacccccgctgcccaggatccactcacaatgggggacgggggacgtggggggcacggaagccccaacacgggaggtggaattaatcacagcaccatacatgggaggtgcctcaattgttgcaatctatgtaatgagagaaaaacaaaaatgactgcttccctgaggaattagagggaggcgttttccattagggttttgttgatgaaaaaggacacgattagagaaaatcctgttgttggcagggccctggtcccgggttcgagccagagaggggcactccaaggaaacggtgtctggggccgggagcagggctcacgcctataattccagcactttggggggccgagacgggcggatcacaaggttaggagtttgagaacagcctggccaacatagtgaaatgctgtctctaccaaaaatacaaaaattagccaggcgtggtggcgggcgcctgtagtcccagctactcgagaggttgaggcaggagaatctcttgaacctgggaggcagaggttgcagtgagctgagatcgcgccactgcactccagcctgggtgacagagcaagactctgcctcaaaaataaataaatacaaaaatacaaaaattagctgggcacggtggctcacacctgtaatcccagcactttgggaggtggaggcaggcggatcacttgaggtcaggagtttgagactagcctggccaacatggcgaaaccccatctctactgaaaatataaaaattagtagggtgtgctggcacacacctgtaatcccagctactcaggaggctgagtagaattgcttgaacatgggaggtggaggttgcagtgagccaaggttgcgccattgcactccaccctgggtgacagagcgagactctgtctccaataaataaataaataaaataaaataagcaaacccttgctgttgtggaagaagatggagccaggatcaaacaggctgaaaaatagggtgatagagctgtctgggaggtgcacagggcaagagggatcatagaaggcttcctggaggaggcggctctgcaaagacagcggaaggaagagttagaagaaggagccaagagaagagatgtgggggaatgttttaagcagaggtggcagcctggaggtgaaactgtgtgtgactccctcaggcaatcggggggtacaggagagaggctgggagaccagggaggagatctggggtgggagtgggggactagcattggggcagaactgggaggggacagatgggagggagggcctggaggtagagcaggcaggatgtggggacagacaggctgtgatggagaggggagaagctggacagaagccagtgtccaggtctccagttcagggatgggggcccagtgggaccaccgctgagatggggacctaagagaaagagccagctgaggggagaggccgaggccagggtggccactgagggtggaagtcctgaaggatgttcaggggggaaccccagggtgatggctgggctcgcaggagggacactgagctacagtcagagctctagcatccatgcagcactgccgttccctctgcccagaacacccttccccatgctccacctgactacactgtcctctccctccaggtctcaacctggaaggcacctccaccttggagcccccctgggctgtacatcccccatgacagccccactgtcactgcccggtcaccgcgagctctgtagtggtggggctgcctccatctcgtctctgctgtgtccctagcacacagtcagcaccctaggcctgtctgttaccagagcaaacacatctgtcattttcaccatcatgtacccagcacccatcacggccctttggtaactctcgccagtcatctcatctcacatggctctttgaggggccaccacacagagggaatcgccagaggccggcctttcacatgcaagtgagaaccgggctgtttccaactgcccaggtcccagaagaaataaaaaaaaggaagaaatgggccaggcgtggtggctcacacttgtaatcccagcactttgggaggccgaggcaggaggatcacctaaggtcaagagttcgagaccagcctggccaacatggtgaaaccttgtctctactaaaaatacaaaaattagccggacatggtggcgggcacctgtaatcccaactacttgggagactgaggcaggagaatagcttgaatccaggaggcagaggttgcagtgagccaagatcgtaccacagcactccagcctgggtaacagagtgagactccgcctcaaaaaaaaaaaaaacaaaaaaacccacaaaatcacgaaagtaggtgatgaagtcaggaaactcagaagtgttatttaagcttaggaaatcaggagggcttcctggaggagatgatattggaggtgagagaatcaaaagttgagatggagctggccaggtggatacctggagcaagagcactccaggcagaaggcacagcccgtgcaaaggccctggggcaggactgcgcctggggtgttggaggaacagcgaagaggcctgtgtggctggagtggagtgagcaatgggagagaaggaggagggaggtcagggcagggacaggcgtgcagggcctgtgggccttggagagaacttgggctttgacccccaagggagatggttgccatggagggtctccataaacctcttcctcctgagtctctgcgactgtagctcccaccacctcatgtggagagaacctcaaaaggagacctttgatgctctccgggaagatgagatgatcctcacccccgacgtagccctggccatggctcctccttcttgagcaagtcccagcctggtcccaggtggctcaactcactgctgcccagaaccccagcatggctgcctcatcctcagcagaatcaagtccccacatccccacacttgtcaggcttctgccccacacatgaagagctccaaccaaaaccatttaggtctgcccctcccacccctatcgttgtctccaccatctcccacctgccagggttggggtgggggctccgggagagaagccacgtgcccttggtttccccatccaaggcatggccacatccgtccctgaaggagttaagggtacaggaaccgtagtggccatcactgtatctgaaattccagcattagggctccatccctgcagaccttgtagaaatcactagtggagttgcttattcactcaacaaacaccgacccagtgcccactttcagataagtctaaaccaggtgcagccccagccctgggctgactgcagccgagtcccggacctgacctgatcctaaccatggactgaacccaaatcctggctgagcttggactgaatctcagaccctgggttgagccagggtcaaccagggtcagccccaaccgcagactgagctccagacttggactaaccctgcctgagccctgctgaccctggcctgagccctaatatcgacagagccccaaccccaggctgagccccaatcccagcccgagccctaatatcgacagagccccaaccccaggctgagccccaatcccagcccgagccctaatatcgacagagccccaaccccaggctgagccccaatcccagcccgagccctaatatcgacagagccccaaccccaggctgagccccaatcccagcccgagccctaatatcgacagagccccaaccccaggctgagccccaatcccagcccgagccctaatatcgacagagccccaaccccaggctgagccccaatcccagcccgagccctaatatcgacagagccccaaccccaggctgagacccaatcccagcccgagccctaatatcgacagagccccaaccccaggctgagacccaatcccagcccgagccctaatatcgacagagccccaaccccaggctgagccccaatcccagcctgagccctaatatcaacagagccccaaccccaggctgagccccaatcccagcctgagccctgactctcggctgagactgtagacactgcctgactctgagtgtcagattcttttaccgcccctggaggaggctgaatccctcccagctcggctacctctaaatcctaaagcccacccggtagcctcagctgcactgacccacgctggctcagccagatccagaaggtgggagggtcttgccccccttgctcccctcagagaccccaggactggaagtttcccagtggcccagcagtgagagtgagcgggttaaggccccggctacagtgggtgggcctcaaatgctctagcctgggaggccctgccaggcgctccatctcctgcccagcgggggccgcattagccgctcaaaacccattcggggaaattagagcagaggcctctgcgacaatcacgggtcattctcgtctcctgttcccaggctctcccgcagcgatgacagcccagcaatggggctggggggtggggacacagggagattgggggatcccagccggccggctcaggctgaagccttctccaagtcagccagggaaagaaaactgtaatcactgcgggctttaaagacatcacttctgtgctccagtgctttccatagcttccagctgacaaagatgtccaaatggttcaatccaacaagcaacagtgaggtcatggcagcaccaggggagaagcccattctgccagctctccatctttctgcccacagtgtgtgcattttacgaatgtcctccagcctcggcaggtcaggaggcaaagtaggtcaggtttacatttaattcagaaatgaggtggacttcaggaatggtttgatccagcattttcaagtggtcttcaagaatcaaggttcagcagtacgcggtgcctcatgcctgtaatcccagcactttgggaggccaaggcaggtagatcacctgaggtcaaaagttcaagaccagcctagccaacatggcaaaaccccatctctactaaaaatacaaaaattagctgggtgtgagggtgcttgcttgtcatcccagctactcaggaggctgaggcaggagaatcacttgaacccgggagacggaggttgcaatgagccgagatcacaccactacactccagcctgggtgacagagcaagactttgtctcaaaaaaaaaaaataaaaaaattaattaaataaataataaaaattagctgggcatggtggcaggtgtctgtaatcccagtcacttgggaggctgaggcaggagaatcactttaacccaggaggcagaggttgcagtgagcagagatcgcaccattgcactcaaggttcagcagggcttggtggctcatacctgtaatcccagcactgtgggaggccatgacaggaggattccttgagcccaggagttcaagatcagcctgggcaatagagtgagacctcgtctctataaaaacaactttgtttaatattagctgagcgtggtggcacacgcctgtagccccagctacttgggaggctgaggtgggaggattgcttgaggccgggaagtggaggttgcagtgagacaagactgcaccactgcacaccagcctgggcaacagagtgagacccagtctcaaaaataaataagtaagtaaaaataagaatcaaggttcattctatcctgagagatctactcccagcctcttccccaacattctgcaagttttccacctccaggttttcactcaaacaagagccctcacctgactggctgttccatgcccacaggtagcacagcagtgcagttcctgaaaagggggtcaggaagctggctactacccaagccaggaattctctgcccttttccaggggtaagtttccccacctagaaaatgagaggattggaatccaggattcttagaatgtctttcagctctaagtctcggtgaatcagaagcccccacagtgggtagttttcggggattagtcctctggtagccattttagtcaacaggcaatatcagtgcgcatttgctatcagctgtgctagggcctctggactgtgataacctctaatcttcacctcctgtgtgaagtaggtactgctccattttacagaataagaaactgaggctcaggcagatccagcctcctgctaaacatcacacagctgtttggtggtagagccaaaacgtagccccccatgctacagcacctctagtcctcctggccaggatttctgggtccaaatcttcaattctggcaatgagagggaaggtggaaggaggcttttttctcccatgaatgcatctccaggtttgtcatgaaggcagtggactcagtttacttcctggaactcccccttcccctgcagggtctcccacattgctgacaaatgcacctccttctttcacagatgtggaaactagggctcataaaggaaaagtgagtctcctaaagtcttactgccaggcaatgcaatggtgtcttcatcagtctggatggactgctacagtaacaaagaacctcttggagccagcctccaagatggccccaatgagcctttgcctcctggtattcatgaccttgtggggtctcctcctccactgaatcggggctgactcgtgaggcatataaaagtgacagtgagtgacttctaaggctgagccttatataaaaggcacttcaacttcctccttggatcaacccctctaggaatgagccagcagccatgttggaagaacactcaagcagtgctatggaaaattctgcatacaaaagtgaaggacaggctgggtgtagtggctcacacctgtaatcctagcactttaggaggccaaggcagatggatcacttgaggccagaagttcaagaccagcctggccaacatggtgaaaccctgtctctactaaaaatacaaaaattagccagctgtggtggcaagcacctgtaatcccaggtactccagaggctgaggcaggagaattgcttgaacctgggaggtggaggttgcagtgagccaagatggtgacactgcactccagcctcggtaacatattgagaaagaggaaagaaagaaagagagagagagagaaagaaagaaagtaagaaaggaagagagaaagagggagagagagagagaaagagggagagagcgagagaaagggagaaagaaagagaaagaaagagagaaagagggagagggagagaaagggagagagaaagggaaggagaaagaaagagaaagaaagaaagagagaaagggagaaagagagaaaggaactcctacccacagccatgtggatgagcttggaagcagctcttccagccccagtcaagccttcagatgatacagccccagtcaacatcttgactgcaaccttgtaagaacttcggagtcagaattgcccagctaagctgctcccaaattcctgtcccataaaaccatgagaggtaataaattattattttaagccactaatttttcaggtaatttatacaaccacagtaactggaacaagctcctaaatcttagtggctctaaaacaaccaaggtttatttgtcatccacactatatgcccaatacaggttggcagggggcctctgtgtctgcctcactcaggcattgagacagatggaggaaacatcagtggtctctaagagaggggaaagaatatgaagaatgggatactggattttaaaggcttttactgaaggggattaacatgacttctactcacattttattggccaaagcaagtcatgaagccacacctcacttcaaacggcagctattggtggggtgcagtgatttacacctttaatcccagcactttgggaggctgggacaggaggatcactggaagccaggggtttgaaaccatcctgggcaacatagggagactccatctttacaaaaataatttttaaaaatagctgggcatgatgcatacctgtagttctagatacttgggaagctgaggtgggaggatcacctgaacccaggaggttgaggctgcagtgagccataatcacaccactacaccccagcctgggcaacagagtgagaccctgtctcaaattaatacaaaaaaaaaaaaaaaaaaaaagacaggtgtatgattttgctggggctaccaaaacaaaataccacgaagtgagtggctcaaacaacagaaatgtatttcctcatagttttggggtttttgttgtttgtttgagatgaagtcgtgctctgttgcccaggctggagtgcagtggcacaatctcggctcactgcaacctccacctcccgggttcaagcgattctcctgactcagcctcctgagtagctgggaatacaggtgcccaccaccacgcccagctaattttttgtttttgtatttttagtagagatggagtttcaccata[134 bp omitted]catgtaagcagggccatgctccctccaaaggctctagggaaggatccattccgtgtttttctgctggcttctgctagttccttggcttgaggtggcataactttaatcttcacatggcgtcctccatgtgaatcttagaatttctgccttcaacttctcttcccttctgcctattacatagcatttccccagctccaagcttccccatatccctccaaagtccagaaaatcaaataagttattctttatctcaggaacttccaaatttcaccttttccctcctcttgtctgttatttgccatgtctaatagagcaaggttgcaatgtcacctttcaccagaagaggctgctcacacacacacaccgtctatcttccagctaaacaccatccctgccttggtttgtagtagatgaagcttgaaattgcttatgatcactaggaagtcagggacacctcagcatagaaactcccacagtcatgggcttaacaaggctgggcccataacagttgttggttgtaaacctgggaggcaggtggtattgaccccattttataaatgggaagtctgagaagcccagcgttgcagacccacagtcttttggcttccatatgtgacctggccctatattctttactcatcttttatcacctacctgatatctaatccctcaaatcctgtcctgtctgccttcaaaacctatccagaatctggccactcctctctcttcctctgccttcaccctggtctgacatctcatcgtcacttgcctggaaccacacagtcccctcttccctggtgcccagctcccgacttcaccccccacagtctatcctcctctcagcagccaccaggggcacctgtgagcacctgagtcagatcctgtccctcctctgcccatagccctccaagaagcattcccagaggagataatacatggtctaagaattcaattccaccaaattagctggaaaagaaaggcagagatttgctcctgcacaccagcctctccccaccttcaggactttacccacacagcctcctcctttgtccagagaacccttcccttcctcctcacctggcctactttgcccagtaaattggggcagagctgggtgggtattctgcatgccctttccaggcaaagttgttccagttcctcatgtcctgcagggtgagacattgagctcctttctctttgcttgctcatcccagaatctcagttttctcatctgataaatgaaaatcaaagagacaatctcttgggtctggctcaaagagtattctgaatgcaagttagtataaccatcattattatttatgaccagaagctccatagtaacatttgtcaagactcttttaagccaccggcctcagttccaatcccacttcctcagagaagctcccttgatatggactaaatgtttgtgtcccccccatccaaattcataaattaaaaccctaacacccctccccaactatgggatggtaattgaaggaaggctcatgatgggattagtgcccttacaagaagagacaccagagagtttgctctgtttctgccatatgagaacacagcaagaaggtggccatctgcaagtcaggaagagagccctcaccaggagctaaattggctggcgctttgctctgggacttccctgcctccagaactgtgagaaaatgatcttttgtttaagccacgcagcctgtggtacagacagtccctgatttacagtagttcaacataatttttttattttttgagggtgacaaaagcaatatacatttagtatgctactctaagtcaagtagcagtgaggtggaggctgggcatggtggctcacgcctataatcccagcactttgggaggc[134 bp omitted]gaggcaggagaattgcttgaacccaggaggtggaggttgtagtgagttgagatcgtgccattgtactcccgcctgggtgacaagagcaagactctgtctcaaaaaaaaaaaaagacaatgaagtggcttccaggtaaacccattataagctgaaaatattgtaaatctaaaacgtattttgacttatgatattttcaacttttgatgggtttattgggtaatgaccccattgtaagttaaggagcatctttgtttagtgatggcagctggagcagacttcactatcctcacagccccaccccaaccaatccccgttttatccccttcattaacttctttttttttttttttttttttttgagacacagagtctctgtcactcaggctggagtgcagtgacgcaatcttggctcactgcaacctccaccttcctggttcaggtgattctcgtgcctcagcctcccaagcatctgggactacagatgcatgccaccacgcccagctaagttttgtatttttaatagagacggggtttca[131 bp omitted]gtttacctacctgctcaactctctaccttgactagaagttaaaccacatgagggcaggtgttttgtccatcttattggtggctggatccccaatacctagaatggtgcttgatatacagtaagtgctcaatatctactggatgaataggcccaggactcgcaccagagtctctgcactgtcacagagggccttgtccccctggactttggaataaacaggacacagggttcagaagcgaagatgggggaagagatcagggttctccaaactgcctttcatgaattgccctaaggcagagtttcctatctttgccactgtgggcatttgaggctgaatcattctctgggctgcgaccatcctgggcactgcagggtgctgagcagcacccctggccttcacccactccatgccaggagcaccccccaagtcatgacaaccaaaaatgtccgcagacattgccagatgcccccagagcatgcaaaatcatccctggtcaaggccactgccctaaagaaatgacttcttggctggacacagtggctcacacttgtaataccagcactttgggaggctgacgtaggaggatcacttgaggttaggagttggagaccaccctggcctccaactctatatggcaacatagcaagaagccatctc[133 bp omitted]gaaaccccatctctactaaaaacacaaaaattagccaggcgtggtggcgggcgcctgtaatcccagctgctcaggaggctgaggcacgagaattgcttgaacctgggaagcagagattgcagtgagcgagtcgagatcacgccactgtactccagcctaggtgacagagcaagactccatctcaaaaaaataaataaataaaagaaatggcttgttgcccacctttctgcctccccgcctgccaaatacatccacagcacttgtgggaagatccgtctgagaccatggattccaggctgggctgatgccggcacgcaggaggcctcgcgcaagacggctggtcccagccagacccagaaaaattagattaactcggagaagctcgccaagacgatccgtcaggccgcctgaaggacagcgtattgatttccacgttgcgaaaaaattaaatgatatccctttttgttatttaaaacgctgcttaagcaattccctaatggaacggcccggcccgggtccaggaactccctggcccggccggcagcgtctccggatcgggtggaggacgagggaatgcggacacggccctgtcttcccctccgggtaattgatgacctcaggagaacagctccattttgcctgcatgcaacgtgcacagttctgatttattaaagacataacaattatgaaaatagctgatttataatcaactcgcccggaccctaattgatttccagggtgaaatttagaaggggaggtattgacaccttgaggacagggcgagccaccggccttggggatggactgtgatgggtggctggggtggaggggggaggacgggacagggagacagcggcctgaatctagttgggttctttgttgcttcatgagatgggctttctgcccagcgttgctggagagggtcaagccgtaatggttgccaccatttcccagtgacagaggcggtccctggctccagcagaggcaactgtgccacattgcagacaaatcaggctgggcccagtggctcatgcctggaatcccagcactttggaaggccaaggcaggaggattgcttgaggccagggttcgagaccagcctgggcaacacagcaagactccggtctctattaaaataaataaagtaataatttttttttttgagatggagtgtcgctctgtcgcccaggctgaagtgcagtggcgccatctcggctcactgcaacctccgcctcccaggttcacgccattcccccacctcagcctcccgagtagctgggactacaggggcctgccaccaagcctggctaatttttttgtatttttagtagagacggggttccaccgtgttagccaggatggtcccaatctcctgaccttgtgatccacccgcctcagcctcccaaggtgctgggattacaggcgtgagccaccgtgcccggccaagtaataatttaaaaaaaaaaaaacaaatcttccagcactctgttgggaaatctcaacattgtcctcatagcagccaggacaacctgatactgttgatacaaatgagtctgccccacaatgtccagaaccttctatctctccagagcctcatgctccggttgccagatgtggccaataaaaatacaggttgccagccaggcacggtggctcatgcctgtaatcccagcactttgggaggctgaggcaggtggatcacttgaggtcagaggtcaggagttcaagaccagccgggccaacatggtgaaaccctgcctttactaaaaatacaaaaattagccgggcatggtggtgtgtgcttgtaatcccagctgctcaggaggctgaggcaggagaattgcttaaacccaggaggtggaggttgcattgagccaagatcgcaccattgcacaccagcctgggcgacagagtgagactccgtctgaaagaaaaaaaaaaaaatacagaatgccgggttcaatctgagtttcagccaaacaacaagtgagtttttagtataagtatagcccatgcaatatttggggtatactcagactttttttttttttttcttaaaaaagtattttctgtttatttgaaattcaagttgaactgggtgtcctgtatcttacctcacaatccttctgtgacgggcaggactccagctcccaacagcccgtaagggacgagactgactcccattcacctgatgggaaaattgaggcaagaggggtcgggcacggtggctcacgcctgtaatcccagctcttagggaggctgaggcaggtggatcacaaggtcaggagatcaagaccatcctggctaacacagtgaaaacacgtctttactaaaaatacaaaaaaaaaaaaaaattagccaggcttggtggcgggcacctgtagtcccagctactcgggaggctgaggcaggaaaatggcgtgaacctgggaggtagaacttgcagtgagccaaggttgcgccactgcactccagcctgggcaacagagcgagactccatctcaaaaaaaaaaaaaaaaggaaaaagaaaaaaaaaaagaaacagaaacagggctttgtgtctctggacctcggtctccacactgcacaatgggtgtgatggtggcccctccatcacgcggtgctcaggctgaggaaatgatttgtggatacccaccagcccatgagcactcgattcttgggtctccccagtgccaacaaagagagagacagaggcaaagacagagagacaaagagagagacaagagagagggatctgggctggttccggaagggcgagccccctttgcggatggggtggcccaggagggtgggaattcagtttgcaaatcagaaggttccagacttttctgtaaggcagggagacagctaaagaggagcctgcaggccgggcgcggtggctcatgcctgtaatcccgacacattgagattgggatctgaccaaggtgggtggatcatttgaagtcaggagtttgagactaacccgaccaacatggtgaaaacccatctctactaaaaatgcaaaaaattagccaggcgtggtggtgcatgcctgtaatcccagctattcaggaggctgaagca[137 bp omitted]gagcctgtaggatgcagagacccagagcacctacccacagctgccaacgcccagtccccaagatggccctgctgagcagttttaagtattgttaaagataaaataatttttccttctctgagccatctgattgacgtggtaatgggccccgcagacagggagaaggtcaggttgcaatgtaatcagttttttctagagtgacgtataatcatgatagcagtgcacctggaaaagggggagggacctgcgacagtccccagaccctctgagctctccgttgcaggacacgacagggccacaaggacggtgggacccagggaggcttcctggaggaggcgtagctgcagctgggattggaaggacatggcatcacaaatgcaaagttgtggaggttggaactgtctctttgtgcctcttcctgatcccactagatcttactctccaggggagaatccaattcccacctttcccagcgtctagagacatccgcatcccttggctcagggccccctcctccaccttcacagccagcagtggctggtctagtccttctttggtttttttgtttgtttgtttgtttgagacagagtctcaccctgtaaggcaggaagacagctaaagaggagcctgcaggccgggcgcggtggctcatgcctgtaatcccgacactttgagattgggatccggccgaggtgggtggatcatttgaagtcaggagtttgagaccagcccgactaacatggtgaaaccccgtctctactaaaaatgcaaaaaattagccggacgtggtggtacatgtctgtaatcccagctattcaggaggctgaagcaggagaatctcttgaacctgagaggtggaggtggagcccaggctggagtgcagtggcgccatctctgctaactgcaacctctgcctcccgggttcaagtgattctcctgcctcagcctcccgagtagctgagattacaggcgcccgtcaccacacctggctaatttttgtatttttagtagagatggggtttcaccatgttggccaggctggccttgaactcctgacctcaagtgatcctcccgcctcggcctcccaaaatgctgggattacaggcgtgagctaccgcgcccggccaggcctggtccttcctgtgttgctatctgattctctctcttctgcctctgtcttccactttaaaagacccttgcgatgatttgggcccaccaggtactccagaataatatctttctctctcatcactagctgcctggcaaccttcattccacctgcaaccctaattctcctttgccattgaatcacattcatggggtctaagattaggatgtggacatctttgggggatcattattctgccaactacaacagctgacttgaaccaccaggcagacagcaccacgtcctacagcttgttctgtggcccaggctggagtgtagtggtgcgatcttggctcactgccgcctccacctcccgggttcaagcgattatcctgtctcagcctcccaagtagccgcgattacaggcgtgtgttaccatgcctggccaatttttgcatttttagtagagacagggtttcaccatgttggccaggctggtcttgaactcctgacctcaagtgatccacccgccttggcctcccaaagtgctgggattataggtgtgagccaccgcgcccggccactaattaggttttttgtttttgttttttgttttttctgtttttttgttttttgttttttgtttttgagacagagtctcactctgtcgcccaggctggagtgcagtggtgcgatgtcggctcactgcaagctccgcctcccgggttcatgccattctcctgcctcaccctcctgagtaaccggaactacaggcatgagccactgcgcctggcccggtttttttgtattttttgtagacagggtttcaccatgttgcccaggctggtcttgaactcctgagctcaagcgatcctcccaacttggcctcccaaagtgctgagattatgcactttcatgcattgggcattgattacaccctgagcgtggagtcatacacttgaccctctttgcctccccagctcctcctcacaggctccaccagggaagaaaataccactgtacctaatgcactgatcaaaacattgagactcagtgactgaacaacttgccaatgatccctcttgctccataaattccgaagttggaatttaaatgtatgcacatgtgatcgcaaagcccgtggatcttttttttgtatttgtatttgtatttttgtatttgtaactacttgtgatttgtataattactattatggttgtatggctactatccttcactgagcacctatttgttgatcagtctccagaattcacgccctagctgactcctctggaaaagcattttacaaaggagagagctcagagaggttgaagggcgtgtccaaggtcacccagtgggcggcagagctagaatttgaacccaagttcccctggctgccgtccactgccttccctgcctctgggaagaaaccagggctttgcggatgatctacagaggccactcatcgagaccctgctcgggttatttggcggtttcaggggctcagcacgctttttttttcttttcggcagaggctggtggcggtccgggaagatgagccaagtgctgagtctgcaatgcgaagtgtctctgcaaaagccaccagccacgtggccacagaggcccagggctgtgcagatgatcaatgtcgccccatccgtcgctctgccatcctctcacctccgcctcggcgtcctttatccctcccactccgggtcgctctccagcttcctggtgcaaaaagactgagcgacactgcagagcgtcctgaaaatgatggtgcagaaatcgtttaaggactgccgaggtgaggaagggcagcccaggccaccatggagacacgcaaggccgggtgccgtggctcacgcctgaaatcccagcactttgagaggccgaagtgggaggattgcttgagctcaggagttcgaggccagcccgggcagcatagccagacccatgttcctacaaaaaaactagcagggcacggtggcctgcacctgtagtcccagctacttgggaggctgaggcaggagaattgcttgagcttgggaggctaaggctgcaatgagctgtgatcgtcctactgcactccagcctaggcaacagagcgagaccctgtctcaagaaaagaaggaaggtttgggatgccaaggcaggtggattgcctgaggtcaggagttcaagaccagcctggccaacatggtgaaaccccgtatctactaaaatccaaaaattagctgggcgtggtggtgcatgcctgtagttccagctactagggaggctgaggcaggagaatggcgtgaacctgggaggtggagcttgcagtgagtcgagattgggccactgcactccagcctgggcgacagagtgagactccgtctcaaaaaaaaaaaaaaaaaaaagaaagaaaatacaaaattagcggggtatggtggcacatgcctgtaatcccagctactcgggaggctgagggaggagaatggcttgaatgtgggaggtagaggttgtagtgagccgagattgcggcattgcactccagcctgggcaacaagagtgaaactctgtctcaaaaaaaaaaaaaaaaaaatagagagagagcagatgaggacacagacacacacagagggaagacaatgtgaggacacaggaaaaatgtggccattgaaaagccaagaagagagacctcagaagagatcagccctgtcaacaccttgtctcaggtgtcttccagcctccagagttgtgagacaacacatttctattgtttaagccaaccagcctttgtacttctttttggcagccctaacaaactcatatagtgcccacgagaccacctttaccagctcttcaatagccaggactctaaaagtcacaaaaacaaagaacaaacagaaacacttgatttcaattgacttcagcaaaaagggagctattgtaaataatagtatgccttcaggcacggtttgatccaggtgctgaagccatgtcaagaccatctgctttcttctgaattaacttcattcacaggaggcttttccacgtggtgatcagatgggtcctaggaggacaaggcatttatcagctcagcaacccctgaggaaaatgtgtcttcttaccccacagcaggacttcacccacaagtccaccaaatatttaggagttctctctgattgggacaacatgggtcatggccctgagataatcactgaggccagaggtgtagcatcctctgattggccagccctgggtatctttgattggacctccctagaaagagactttaaggcaaggatttgtggggc[142 bp omitted]ctttactaaaaatacaaaaattagccggatgtggtggtgcgtgcctgtaatcccagctacttgggaggctgaggcaggagaatcacttgaacctgggaggcagaagttgtggtgagccgagatcatgccattgcactccagcaaaactccatctcaaaaaaaaaaaaaaaaaaaaaaaaaaaagcattccaggaatcactgggaggggagaggaaagtgagacaagggagggaaagagccaacacaaggggtgttaatgagcaggtgaatgtgcgggaaactggggctcggtcccactgggaacctctgggaggtacagaacctgcttggagttatcccaacagatgggtcagggagctgaagtattgatccacccactccccatctgtaaaggtggaaagctgcattagctctcctgccctctggcctggcttgcacaggaccaaatggcctccaacagccagcaggacaccatcagacaggagatgtcacaggtgttagcagtatacagccttcgcatgcaaaggtgacctcaaggccaggtgtggtggctcacgcttgtaatcccagcactttgggaggccaaggtgggctaatcacctgaggtcaggagttcaagatcagcctggccaacatggcaaaaccccatctctactaaaaatacaaaaaaattagcttggtgtggtggtgggcactgtaatccagctacttgccaggagaatcacttgaacccaggaggcagaggttgcagtgagctgagatcatgccactgcattccagcctgggtgacagagcaggactcagccttaaaaaaaaaaaaaaaaaaaaaaagtgacctcacgatcataggggtagggttgcactgggtcacagcctccctccctggttcccaggttgaagctgaccctgcctggacttcaggaaccaaaagcaagacagggaagttcctcccagaaaaatctaaggtgctgttcctgaaaaaggaagggtgcaatggtcttactagagtcacttctccttaattattcccatggataccatatgtgcccactgggtgcctcttgacattgccctcaagttgtccatgaccctgagcaccttctcagtctatagggccgatcaccctttccaacatcacacagagagaggaccagatggtacgatggatgacaccaaggctgctgttatttctgtggctgccacaaggtgttgctgttgaacaatagtcttgcacagtctgttgcctccttttccctttgcactggccccagtggaaccccaactgaggtccgcaaggttagagtcctttgatttacattcttgaatgacttcaggccccaatcaccaagctagacacaataacagggaaagtgaaggaggtagaacttccagacacatgttgcgttcaaaaccaggttttcctccgttctcctcctctgtcccccttgagactaagttcccacgtgacagcactaggcttccttttctgccttcaggtgtccctcggggccactcctgcccatcagagagaacctcagaagcaaaagaaactggattgcaattcctttgctccggtgaatcccacttcaacaccactagtcagctctgcacacgaaggagtttgaggaacggcagcctttgtccaagtactggtattcattacctattactgtgcaacagattatcacaaacatagcagcttgaaataactcatttattatctcacagtttctggaagtcacgcatccagaaacaacttagctggtcctctgttccagggttttcccaaacagctacaatcaagatgttacctggggccaccgacatctcaaggtcaccagagaaagatctgcttccaagttcaagtggccttgctcgcggctgctctttgttcttcttcctcttctctcttcttcttcctcttcctcttctcttcttctccttcttcttcttcttctccttcttcttcgacagcctcttagtttgttacccaggctggagtacagcagcatgatctcagctcactgcagcctcaacctctccagctcaagcaatcctcctgcctcagcctcccaagtagatggggactggaggcgcacaccaccatacccagctaattttttctatatacatatttttagggacagggtcttgctatgttgcccaggctgctcttgagttcctgggctcgagcagtgctcccacctcagcctcccacagtgctggggttacaggtgtgaacctctgtgtccagcctgatggttgcttcttctcactctcttgcagtcccacttctatgggaataacctcaggctggtctttcagaaatcagagggcccatggaagagagcccagttatcccagccaaccccctaacaagaaaggaagcccaaccaagatcagcagagctgcctatccaaccccaagttcactgcaaattcactgcagagacaggaatgagcccacttgagactggaagagtcagatggttttatctgtagacttacgaacacaaataaatgcttaggccaggagctgtggcttacacctggaatcccagcactttgggaggctgcagcaagaggatcacttgaggccaggagttcaggaccagcctggccaacatagtgaggtgccagctctacaaaaaaaaaaaaaaaaaattaggaaaaaattacctgggtgtggtggcgcacctgtagtcccagctacttggaagcagaggtaggaggattacttgaacctcagaggttgaggctgaagtgagccatgattgcaccactgcactccagcctgggcgacaaagtgagaccccaactccacactctctctcacacacacacacacacacacacacacacacacacacacacaaataagataaaataaaaacgcttagtgcttgaagtcattggctgcagggctacttgttacgtacgcagcagtagctgactgatccaaccagcaatagcgtcatcatcaccatcccccacaatgggcacccacttgccttcaatatgaataaaactaagaggaatcattcaactgattctctctaaataaagaagttctgcttcaaggagcttagctgtctccactgtacaaaggaaaggtggccggcagcgtctgctgattaaaaaatgttaagttccacttcaccaggcatcccaataccctcattttccatccaccctccctggaaggttgagaagccagggagtgctcttccaggcttgcagaccgggtcacagattggccaggggcattcaggaccctttggctgccatgaacaggacccctccctgccatccaagtcccagctgcttgcagctacggaggctccctagctcttctatccaacgaactcgagaccttcttatggtcaggcatggtggctcaggcctctaatcccagcactttgggagaccaaggtgggaggaatacttgagcccaggaattcaagaacagcctgggcaatatagcaagaccccatctctatacaaaatttaaaaataaaaaatgccctgggcacagtggtgcatgcccgtagtcccaggtactcaggaggctgaggcatgaggattgtctgtgctcagaaggtcgaggctgcagtgagctatgattgcaatactgcattccagcgtgggtgacagtgagaccctgtctcgaaaaagaaagaaagaaagaaagagagagagagcgagccaggtgtggtggctcacgcctgtaatcccagcactctgggaggccaaggcaggcggatcacaaggtcaggagatcgagaccatcctggctaacacggtgaaaccccatctctactaaaaatacaaaaaattagccaggtgtgctggcgggcacctgtagtcccaactacttgggaggctgaggcaggagaatggcgtgaacccggaaggcggagcttgcagcgagattgctccactgcattccagcctgggtgacagagcaagactctgtctcaaaaaaaaaaaaaaaaaggaagaaaaagaaagagagaagaaaagaaagaaagagagagagagaaagaaagaaaggaggaaggaagaaaggaaggaaggaaggaaaggttctcaagacgggcagtaaattttagtagaaaatggcaggactggcttcagaaaggctcacactctcagtgtcagtcgatcaggaacaagatggcttgtgttttgccttgaccatggcctagtgcttggcaatgtccagaattctttttttttttttttttttttaagatggaatctcactctgtcactcaggctgaagtgcagtggcacaatctcagctcaatgcaacctccacctcccagattcaagtgattctcctgcctcagcctcccaagtagctgggattacagacatgcaccaccacgcccagctaatatttgtgtggtatttttgtttgtttgttatgttgtttgtttgtttgtttttgcttttttttcagtagagacagcgtttcaccatattggccaggctgggtcctgacctcaggtgatccacccacctcgacctcccaaagtgctggaatgacaggcatgagccaccacactcagccatgtccaggaattcttgataagcagctctggctacaggcaccaacttgcacctgccaggaccttccctataagccctggacctccccaaggtccgggcactaacagggctgctgggacctgcttcagaacactcattctcactggtcaatgccacaagttgtatctgtagctaatttgcttttaagagatggggtcttgctatgttgccaaggtcggatgcgaactcctgacctcaagcaatcctcccacctcagccttccaggtgctgagattacgagcatgaaccatcatgcctggactctctaaattttttgtctgagagagtcttactctgtcatccaggctggagtgcggtagtgcaatcacagctcactgcagcctcgacttcccaggctcaagcaatcctcttacctcggtttcccaagtagctggaaccacaggtgcacaccaccacaaccagctaactagaaaaatgtttttagagacagggccttgctatgttgcccaggcttctaaatattttttatcatcactctggaaagcaagagttcttggccaaatagcttagtagttaagaatgtaagctcggctgggcgcggtg[131 bp omitted]tggcgggtgcctgtagtcccagctactcgggaggctgaggcaggagaatggcgtgaacccaggaggcagagcttgcagtgagcggagatcatgccactgcactccagcctgggtgacagagcaagactccatctcaaaaaaaaaaaaaaaaaagaatgtaagctctaggccaggtgcagtggctcacacctgtaatcccagtactttgggaggccaagacaagagaatcacttgaggccaggaggccaaggctgcagtgagccatgtttacactactgcactccagcctggacgacagagcaagaccttgtctcaaaaaaaaaaaaaagtaaataaaatatatatgtatgtttcactgtatttgtagaaattataggaagagtcacaagaaattaatagaattctctcatagtgggaaggtagaagctgagtggaaaacaagagagccaggcatagtgattcatgcatgaagtccttgggaggctgaggcaagaggatcatctttgaaaacaaaagacagcttagactgctcctgagccaggtggagctgcggcatacccctgagtgtcgccaatcaaagatagcctacatcagcccaaccccaaccagatcccagacacaggagcaataacacataactgtaagccagggagttttagtttggcttgttacgcagcagtagctaaccattacacttccaaaagataacactgtcatgaaccccattttatagatgaggaaatggaggctcacgttcattctcactggtcagtgccacatgctgtatctgtggctaatttgttgtggctttttgtttttgttccttttaacacagagtctcattctgttgcccaggctaaagtgcagtggcacagtcttgctcacttcaacctctgcctcatgggttcaagtgattctcgtgcctcagcctcccaaatagcttcaggggaagcctgaagtttcccagctaatgagtgataaagccaggattcaatctcagatgcccaaattcttaatcattctgtatcctgccccttaatcattctgtatgctgtctccctccaggctaagccattccttctgagtctctcctgcccaagtctttacctttgaaaggaatcacaggctcatagagacagaaagtaggatgggtggagggtagcagaggctggggagggggaggggagtgagtgtttcatggggaagaatttgagtctgggaagatgagaagattctggagatgaagggtagcaatggttgcacaacattgtgaatgtacctaatgccactgaattgtatactttcaaatgggttaaggccatgcacgcctataatcccaacgctttgagaggccaaggagggaggatcacttgagcccaggagcttgagatcaccctgggaaacatagcaagactttctctacaaaaaatacaaaaatcagccaggcacggtggtgcacacctgtagtcccagctactcgggaggctgaggcaggaggatcacttgaacccgggagtttgagactgcagtgagccgtgctcgcaccactgcactccagcccaggcgacagagtaagaacttgtctcagaaaccaaaaagggagttaaaatggtaaattttatgttatttctattttgcctcaatttttttttttttttgagacaaagtttcactcttgtcacccaggctggggtgtaatggcatgatctcggctcacggcaacctctgcctcctgggttcaagcaattcttctgcttcagcctccagagtagctgggattacaggcgcccgccaccacgcctggctagtttttgtagttttggtaga[134 bp omitted]gggagaggcagaaggaaggtttcagccttcctcacttggtgacctcactttgtgcttctcacacttcacctcttcacaataggcctagacgcagtgccagggaccggttttgagaaattgagacccagagagggtggagaattgtccaagactacacagcaagttgaaggcactgccagaacttagacttcatctacaaagtcaaactcggcctgaacgaataagacaaccccaggatccctctccagggagtgagcgattttgcttaagctcctggtggcagggggaaggagaaaggcaaggaagcaatttttctgttgcctgagccctgagaatttcctccctggggagaggcactcgctggtgaggacgtgtccgtgaagcctccaatcacaagattaggtgatttcattactgtctgaaaagctgccgggatggggacggtttgagcttacaaataatcacccccgatgcagggtgctgaagatatcacagatcccagaggctgctccggtggtggggcccgagttgtcagcacgtggggagaggggctctggagtcagagaaagagaagaacctgtccaaggtcgcacggcaaaaagggacaagagactcccctacagccaccagagcacttgtggttaaacctgagacaggtgccctccctcctctgcccacaacattccatggctcccaccttcctcagggtaaaagcctaagttatctcacaaagcccttggccgggcacggtggctcacacctgtaatcccagcactttgggaagccaaggcgggcggatcacaaggttaggagatcgagtccatcctggctaacacggtgaaaccccatctctactaaaaatacaaaaaaaacagccaggcgtagtggcgggtgcctgtagtcctagctactcgggaggctgaggcagaagaatggcatgaacccgggaggcggagcttgcagtgagccgagattgcactactgcactccagcctgagcgacagagtgagactctgcctcaaaaaaaaaaaaaaagccctgcatgacctgcccgctaccccctcatcgcctcagtgcactctcctcttccctctctccccatccctccctccacactgtccgtgtggcttcagccacataggtctcctcgctgttcctccaacgtgtcaggcacagtcctaccccagggcctttgcagaggctgttccctctgcctggaactctcttcccccacatccgtcacttaaaccaacgcattttcctccatcctattcccaggcttccatcttcacccccacgacctgtcctctctttggcagccagagggcgcctgtgagcccctgagtcaggtcctgtccctcttctgtccacagccctccatagctcccacttccctggacgtaaaagcccaagtcctcccagcagcccacaaaggcctgcatgatttgccccgtcccctccctgcctccccttcctccctctctcccactcttcactccgtcccagtccctgacactcaaaaaaagaaaacaacaacaaaaacaaacgaaaacaaaaatggggactttgcacacacctaggatctgaaaggaattttcagtgcatagcccatgcctggactcctccctgagtgaggagctcactgcctcccaacagctgtccttttatctatgagctgtgccggccatgagccaggtcagcctctgcaaaatctgggctgagtgtgaagtgcatgtgtggagggaaggggttaaaatgaggtcaggggcctggcacggtggctcacgcctgtaatcccaacactttgggagtctgaggcaggtggatcacctgaggtcaggagaccagcctggccaacatggtgaaaccccgtctctaccaaaaatacaaaaaatgagccgggcatggtggcgggtgcctgtaattccagctacttgggagcctgaggcaggagaattgttgaacccgggaggcggaggttgcagtgagttgagatcacgccactgcactccagcctgggcaatagagcaagattctgtctcaaaaacaaaagaggtcaggatcttagcagggaggctgctgttttgcataggttggaagtccccctgaggccacgggagcttgattaatccagaccctcccttctctgtctttgtctctctctttctgacagtctctccctctctttctcccttggtttgtgtctgtctgcttctgtctctcccctcttctctctcacctctgtgtttctgtctctgggtgtccatgctgttaaaagtcatacagatatgagacagcgttcaaccccaactgaaaattgccagccaccccagcagtggaataattgaatcggcgggcagcaggactgaatcaagtgagggtggaagggggcacattcccagctaaaagtggggccctcgttagggggatgcagtttgctgttggtagcaggaacatgagtttgcagggtggcgaggggggagtgaactcccactggcaggcctggctccccaggcttccctgctgaagacaagctgagtcctgcagagagaggctgaggcctgagtcgcatctatccgccccctcccccaacttcaacacatggagtctgcttaatgctccgagccacttgacaggccccagttgagggtttcaccaggatccacagccagccaagcccagctcatcaaagtggggctccattctccatcatccgaccattcacgtatctgccttctccatcacggatccatccttcacccatccagccaacacctacccatccatccttccttccatttcccaaacccccatacactcacccatatacccgcccacccattccccatcgtccgccttccatcccccaaccttcatatcccatccccctttcactcacctacacacccacccatatacccacccctacaatccccattcactcatctaccctttcctccaccatctacctacaggcctatccatccttacctccactcaaccacctacccaaaaaccatccatccatccacccatccatccactcaccatccattcatccactcatccatccatcaacccagccatccacctgtccatcaacacacccaaccattcactcatccatccatcatccatccattcacccatccacccaccacccacccatccatccatgcagctatccatccatccatccatccatccatccatctatccatccatccatccatgcacccattcacctatccacctacccatccatttatccattcatgcatgcatctacccatctatccatccatccattcatccatttatccatccatccatttatccatccatccatttatccatccatccatccatccatccatttatccatccatccatttatccatccatccatccatccttccatccatccatccatccatccgcccacctacccatccactcatccattcaccacccacccacctaaccatctactcatttatccacccatccatccatttatccatccatccttccatccatccatccatccatccatccacccacctacccatccattcatccattcaccacccacccacctaaccatctactcatttatccacccatccacccatccatccatccatcacacactcattcatccacccatccatctatccattcatacacacgcacacacacacacacacacacacacacacacacaccctcccatcccccacccatccacctttcatcccctatccctccatctcccatcccctattcaaccatccctccactcacctttcatccatctgcccatccatcctcccctccctcaccccacatttcccacccacccatccatccacccatacacacacacccacacacccattgattcattattcagcaaacgttaggctcttgctgagtgcccatatctacactgggtactgaagatacgggaattaaaacagccgaggcccctgctcgattggagattagcacctagttgggaagataaatgttaagcaaaccccggcacacacaacttcattgtagaaattgtggtggttccttggggagacactcaggccgctctgagatgggcaatgctgggaggggttcgggtaggttggggggcatgggagagctctgagggggaagggtgtggcaggcagagggagcagcatatgcaaaggagaggcagatggaactgcccctggggagggaacctggacaaggagtgggtttggggagaagttgctgctgccagattgggtgctgctgtgtgtgagaagcctgaggggaagataggcagcagccagccacagggggtggccagagggcaatggagaggagaagggatggccagagagatgggagggaaaccaggatgggtggggtcctaaagcctaggggaggggctgggaatgatcgacgatcacttccccttgctcagatggagaatttgacgtccagggatctgcatggacctgtctcccagtcaagattctgaccaacatctccctgggagaggcagaggctgcagtgagctcagatcacgccactgcgctccagcctgggtgacagaacgagaccgtgtctcaaaaaaaaaaaaactccctgggaggaccatggaaggagtgcccttctgtaggtggtttctttttattttattttattttattttattttttggcagttcactgcaacctccctagtagctggacccaagcccagctaattcttgtattttttgtagagatggggtctccctatgttgccctggctggtctcaaactcctggcctcgagcgatcctcccacctcagcctcccaaaatgccaggatgacaggcgtgggccactgtgcccagcccacagctggcttctgatcccagccgggtcggctctggctggggctccctggtcaggccacacatatgacgtaatagcctccctgttctgggctgtgaaatgggaacagttcacccactccatgaggcaatggggaagcaccaagggcaagatgaccacagtaggacactatggagtcctctacaccatgctagcatggcctcttggcccctgcatcattcattcattccttccttccttccttccttccttccttccttccttccttccttccttcgttgaatccgggaggcagaggttgcagtgagccgagatggcgccattgcactccaacctgggctacagagcaagactccgtattgatgaagtgcccaggcaccgttctgggtgttgggaagacagctacgaacaaaacagacccactccctctgtcctcactgatattaaagtagagtgaggctgggtgcggtggctcacatctgtaatcccagaactttggaaggctgaggggggtggatcacttgaggtcaggagtttgaaaccagcctggccaacatggtgaaaccctgtctctactaaaaacacaaagaaaaaaaattagccgggcgttgtggcaggcgcctataatcccagctacttgggaggctgaggcaggagaattgcttgaacccgggaggccgaggttgcagtgagccaagattgtgccactgtactacaccctaggcgacagggtgagactccgtctcaaaataaataaataaaataaaaataaaaatagcgacagagtgagactccgtctcaaaataaataaaataaaataaaaataaaaataaatagagtgagacagataataacacacaaatgcataatctaatttcagggagtgggaggaatcctaaagcaagaagcgaagcacagggcgccacacccttgtaatcccagctactcaggaggctgaggcaaaaggatcatttaaagcccaggagttcgagaccagcctgggcaacaaagggagacctcatctcaaagaattctaaagcaagggaaagcagaaaagaaggacaaaaatagagtaatcagggaaggcttctctgaggaggtgacatatgccctggaaggaaggcagtctggctaagaggtctgaggtaggaccaagtttagcattttaagaattgcttaagaatcaggcacggtggtcacgcctgtaatcccagcactttgggaacccaagacgggtggatcacttgagctcaggagtttgaggccagcctgggcaacatggtgaaaccctgtctctactaaaaatacaaaaattagctggccgggcatggtggcacatgcctgtaatcccagctacttggggggctgaagtgggaggatcgcttgaacctgagaggcaggaggctgcagtgagccaagatcgaaacactgcactccagcctcagtgacagactgagaccctgttgaggaagaaaaaagaagagaaggagaaggaaaagaaagaagaaagaaaaataagaagaagaaaggagaaagaaggaagaagaagaaaaagaatcagctagttttgaggcaagatgatcgcttgagcccaggagtttgagatcagcctgagcaacatggcaagactccatctctattattttttaagtaaataggattttttttaaaaaagattcagctactttcttttgagatggagtctcactctgtcgcccaggctggagtgcagtggtgtgagctcagctcaccgaaacctccgcctcccagattcaatcgattctcctgcctcagcctcccaagtagctgggattacaggcacacaccactacgcccggctaatgtttttgtatttttagtagagacagggtttcaccatgttggccaggctggtcttgaactcctgaactggagtgatccgcccacctcggcctcccaaagtgctgggattacagatgtgagccaccacatccagcctagaatcagctactctttgtggctggaactgtgggagggaggaagggagagaggggtccacactgcctggagcctaccctggcacttcccgtcccccttcctggcttacttctccgttatgattcaggctctgtgacatgctatacatttttctttttttttttttttgagacggagtctcactctgtcacccaggctagagtgcagtggcgtgatctccgcttactgcaacctctgcctcccgggttcaagcgattctcctgtctcag[135 bp omitted]gcctcccaaagtgtttggattacaggcgtgagccaccgcgtccagcctacatttttcttatttacgttgcctgctttctctcccctagactgctggctccgtaatgatgggacttctttccttcaggcctgcttgttccttgctttgccttcagaaactaaaacagtgtctgaaaatgtctaaatgaatgaatggacaaatgaacaggcatccttctcatcagaaggatggggtgggagggtaatcagcctctggccacttcaagaggcccctttaggaggtcagagctaagaggtacagggtcagggccccccttgattactgagattctaattaactctggggccgagagggccgctccgctctgaggaattatagataagtttgcaccccagtgtttgagcagtggctctgtggggggcgggcggcagctctccctcccctgccctcccacccacagccagctggccagggaggcgggcacagagagaggtcatttgcataggcaggtaattggttttgcaaataaatctggttcttgaaatttgtagattagtaataatacgtctccagatgagagagaaaggtcacggatgaataaaacaacaattaaactttcaggagattattaaactaaacagaaacctggcatggggtggccgagggaataaggagctgggctgggaaggtgggggtgatgggagtgggggcatctgctgcctccgctcccgctcccagatcctgcttgccagggtctgggcagagtagaacgccccgtgatcctcccagaatagcttttaggattcccatttctcagtctagaaaactgaggttgaagaaggaagaggaagaggccctaggtcacccagtgaggccacaccccaggcaggagctgaacccaagcccattagctttgcgctgtcctgggtggcagagaacctcatattggcaaagggatgggcgcaatggctcacacctgtaatcaaaacactgtgggagaccaaggcgggagccgtgcttgaagccagcagttcgagaccggccttggcaacatggtgagaccctgtctttacaaaataataatataggcaagggaatgagatgtaagaaa[146 bp omitted]accccgtctctactaaaaattcaaaaaaattagccgggtgtgatggcacacgcctgtaatcccagctactggggaggctgagacatgacaatctcttgaacctgggaggcagaggttgcagtgagccaacatcacaccactgcactccagcctgggtgacagagtgagactctatcacaaaacaaaacaaaacaaaacaaaaaagcaggcaaagggttcgattcccctctctgcacttcttggctgtgtgaccaggacaattccattctcccgctgtgcctcagtccttccatgcctatgaaattgaggcgaagcattttatgtgtgatgttaaatttgcaaatgttattatacttgcgtggcaattcaatgtgacacagcagctaatggaccgggcaccgtgcctggcatggtgtaggtggctgctttgggcatgctgggtccttggctgcaagcaacagaaatgtgctccaggaaacaaaagcagaaccaaaatgtataggtaactcggggtggaaggcaagggtgaagaaagacgtcagccaatagggagaaactgaggaaaggcgccaggtaacagccatctttcggccgccctctggcatgtaaccttgggtgagtcacctttccccttgagacctcagtctccatagctctaaaagagggaatagttgtgtctactttgcttattcagtttcatcattcaaaatattgactgagccccaaggccgggcgcggtggctcactcctgtaatcccagcactttgggaggcc[133 bp omitted]gaggcaggagaatggcttgaacctgggaggcggaggttgcagtaagccgagatcacagtgttgcactccagcctgggcgacagaatgagactccgtctcaaaaaaaaaattgactgagcccctaatgagttccaagcattgttccaggcactgaagatgcagcagagaacaaaacaggcagaaatttctgtcttggaagcgctggcagcctagttgggcagaca[143 bp omitted]tgaaaccccgtctctactcaaaatataaaattagctgggcatggtggtgggcacctataatcccagctacttgggaggctgaggcaggagaatcgcttgaacccaggaggtggaggttgcagtgagccaagactgtgccaccgcactccagcctgggcaacagagcgagactccatctcaaaaatatatatatatatatacacacgtgtgtgtgtatatatatacacgtgtgtatatatatatatatatacacacgtgtatatatatatacacacatatatgtgtatatatatatacgtgtatatatatatacacgtgtatatatacatgtgtgtatgtgcgtatatatatacaggtgtgtatatatatgtgtatatatgtatatatatgtatatatgtgtatatatgtatatatgtatacatatatgtatacacacacacacacacacacacacacacacacacatatatatatatatatacactgagcccctaatgagtgccaagcattgttctaggcactgaagacgcaccaaagaaggcagaaatttctttttttttttttttttgagatggagtcttgctctgtcacccaggctagagtgcagttgtgcgatttcagttcactgccagctccgcctcccaggttcacgccattctcctgcctc[222 bp omitted]gttgggcagacagacaatgagcaaataaatccagaaaatctgtagggttttagagcatgctaagtgctgtgaagaaaatcagagcatggaaagtatcaggaagggacaagaattggaaagggagggcaggttgcaatttttttttaagagatggcgtctctctctgttgcccaggatggagttcagtggtgcaatcacagctcactgcagtcttgatttcctgggctcaagccatcctcccacctcagactcttgagtagctgggactacaggcgcacgccaccacacctggctaattttttttttgagacggagtctcactctgtcgcccaagctggagtgcagtggcatgatctcaactcagcgcaacctctgcctcccagattcaagcaattctcctgcctcagcctcctgagcagctgggatttacaggcacaatttttgtatttttagtagagtcagtgttttgtcatgtcggccaggctggtcttgaactcctgacctcaaatgatccacctgccttggcctcccaaagtgctgggattacagacatgagccaccatgcccggcctaatttttattttttattttgtagagatagagtctcactatgttgcccaggctggccgcaaactcctgaactccagtgatcctcccagttgcaattttaaacagggtcatcagggaggccctactgagaagaagatttagaccagagacctgaaggagaggaagaagggaaccaaagagagatctagggtaaaagcattcctggcaggaagaacagcctgtgcaaaggccctgaggcaggactatgcctggtgtgttggaggaacagtgaggaggcccatgtggctggggcagagccaagcaagaggcagaggggaaggagatgaggtcagggaaatgatggagggtagattgcgcagggccttggaaatgacaaagaagactttggcttatgccctgagatggaagcctcacgttctcactttagcatctccctgaggtagtcactaaaatggtgaagagtgtccactcctttttcccaacccattcaatggcagagattgtgggttggcctctaacatccattccccactttctcctttacaaatgaaacctgcccagctaaagactgtgttgcccggcctctcttgcaggtcagtgtgactgtctgacatattgtgaacaacgggacagaagcaggtgtaacctcagaagaaaataacaggccttcttcttcctcttcccccactgccccccacctgtgtctggaaggtggccaccatcacaggggccggagtagccactgtggtccacaagatagaagttgggggctgaggaggcagagcaacaagaccgaaggagccctgggtccctggtgattgtggagcctctgctgcagcctgggttgatgcccaggttatgaggacaggagtgatgagtgtcacccttgtttaagccatggtcttatgggtttctggcaacatagatcatgaataatcaaaagttgttgttttttttttcgagacggagtctcactctgtcacccaggctggagtgcagtggtgtgatctccactcactgcaagctctgcctcctgggttcacaccagtctcctgcctcagcctcatgagtagcttggactacaggtgcccaccaccacacccggctaatttttggtattctttagtagagatggggtttcaccatgttagccaggatggtcttgatctcctgacctcatgatccacccgccttggcctcccaaagtgctgggattacaggtgcgagccactgcgcccagctgaataatcaaaagttttgagcactctcactgcccctattgcagatttcagagtttttgttgttgttgttgttttggagacagggtcttgctctgttgccaggctggagtgcggtggttccatcacaagctcactgcagcctcgacctcacaggctcaagtgatcctcccactcagccttctgagtagctgggattacaggtttgagccacctttgatttttttttgtggagatggggtgtcgttctgttacccaggctggagtgcagtggtgccatcatagctcactgcagccttgacctcccaggcttaagtgattccccaacctccacctcctgagtagctgggactacaggcatgcaccaccacacctggctaatttttaaattttttgaagcagttagcggggggtctcactgtgttgcccaggctgatcctgaactcctggactcaagcgatcctcccgcctcaccctcccaaagtgatgcgaatacaggcatgaaccaccatgcccagccttccagacttttgctcttccgtgctaacactcccctgatgcaaaacgcccatcctctctcctctcctcctcccaatcttcctttggctcttggcctcgttcctccaaccttgctgcaaccaagctgtaccatgctacaagctccaccttgtggccagcctggtaactgaccttggctctcctcttcctgatgctgtccacttagtttttttccaagacttagttttattccaagatatgttcagggacatccatcctcccctacattccttcatcttcatatctccctccctctctcttccaaatttgcagttcctctagaaccaagctgggtcctttcaacccctatgttgtgcatttgtggtgattctgtaaggcagaaaggggaccagagagggtgaatgggctggctgggtcacacagccaagccatcctctccagaggaagctgaagagtgagcctggtcaagagaggatacaggctgggcatggtggttcacatctgtaatcccagcactgtgagaggccaaggcaggcgattacttgagcccaggagttcgagaccagcctaggcaacatcatctctacaaaagataaaaaaattagccaggtatggtggcgggtgcctgtaatcccagctacctaggaggctgaggtgggaggatcgcttgaggccaggaagtggaggctgtggtcagctaatattgtgccaggtatatatatatacctgggcatggtggtgcacatctgtaatcccagcaactctggaggctgaggcacaagaatcgcttgaacctgggaggcagaggttgcagtgaactgaggtcactccactgccctctggcctgggtgacagagcaagacactgtttcaaaaaaaaaaaaaaaaaaaaaaaaaaaaaaagaagattgatgacagagaccatgaaccttctggtctgaggacacaggacagcggggaccctcagacacagggccccccattagtcttccaggaaatccttctatcaaagctcaatgatctcattccttcctttgttccacaaacacttattgagcaactgctgtgtaccaagtcctatttggggtgctggaagcaaaacacacttgccctcttcctcccaggctagtgtgggaagcatgggtgaggtcagactgtgatgaaggcacccagaggaggcccctgacctgggccttgggcttcccagaggaggtgacgtggaggctgagatgtgaaagatgaagaggagaaagtagcatggtccatgctgagggaacggcaggagcagaggctccgaggtggggtggggtgggtttgagcccctaagaggcagccagttgtaatagaggccaacggcctgcagagctgggggcgagagcagggccttgatctcaagggcaatagggagccaaggaaggatttagagcaagggaggagtgagattggatttgcctttgaggaagattccaaagaggaaggaccggagggcacaaggcttgaattcagggcccaggacggggctgtgcctccttcaccacgtcctctgctgcgcccgggcgcaaggaggaaggagagccgggagggcgtacctggcagccaaaagcccagccgctaatgagcccggtgcggcgcgagctatttttagcagctgctcctcgggacgcctaatcgctccggccggctcccgccaggctgccatggaaacgctcgcgccaccgccaggagctccctcccggtcccggccggcgctgcccgcccctcagcccggggccaggatgatgcgtgctgccccccgccaggaaggagccctgcctgccttcccagcactgtcactgcacggctgtgcgatcccgggacatctctgcccctctctgggccttagagggcaagagaggtaaaggcgcgcactggaggctgagaagcacgtttgaatctccgctgggccaacgacttggggtgcaaggtcaggagtgtcccagaatctgagccctctttttgtcatctgaaaagcaagcccccgcctcatttaactgcggagagcacccggccccgaggaataagtgatttcagaattccaaacactcattaaacacctactgcatgccagccattgccctaagctctttttttttttttttttttttttgagacggagtggagtcttactctgtcgcccacgctggagtgcagtgggacaatgtcagctcactgcaacctccacttcctgggttcaagcgattctcctgcctcaacctcccaagtacctgggattataggcatgagccaccatgcctggccttttttcttttttttcttttttttttttttaagagacagggtctcgctctggagtgcagtggtgcaattgtgactcactgcagcgtcagcctcacaggctcaggtgatcctcccacctcactctctggagtagctgggcccacaggcatgcaccaccacacccaactaatttttgtattttttgtagagacgaggtttcaccttgttacctaggctgatctcaaactcctgggctcaagtgatccacccgcctcagcctcccaaagtgctgggattatagaggtgagctaccacccccggcctaaatttttatttttatttttatttttgtagaggcagagtcttgctttgttgcccaggctgggtcttgaactcctggcctcaggcaatcctcctgcctcggcctcccagagtgctgggatcacaggtgtgggccacagcacccagcctgccctaagctttctatgcattcacttgattaattaaatccagaggcatgttacaggttatgcattcacagatgaagccattgctgccaggaggttaactggctctccggatatggaggcaaggaagggacccaggcttactggatggggacgcagagggtgagaggcttccctcctccagggtgcaggtagggacactgaggcagagacgagggtagcaagttgcccaatgctgagagccctggagttgggctctctctcgcccaccgaggaaagctattatagaggggtcgtgggcgggtggcgcggggcagcccgccaacaactgacaccaggggctatttcaggaagtgtcactcagtcagttgggacaggctgaggcccaaggagggaggacaggaagaacaaagccctgacctgggccaggacagggaggtggaggcaggaaggcagagtgcatgagactgcagccatgtgacctacggcatgtctgctttgccgctccgggcctcaatttccccatctatagagatgaggtcttgctatgttgcccaggctgttctcaaattcatgggctgaagcaatcctcctgcctcagcctctcaagtagctgggaccacacgcacacatcaccataccaagttaatttttaattttttgtgggcacagggtctcacagcatagcaagactctatctctacaaaagaaatgaaatgggagaaggggatttaaaaaattaagttacattttaaaactgaccaggagcaatggctcatgtctgtaatcccagcactttgcgaggctgaggcaagagaatcacttgaggccaggagttcgagaccagcctgggcaacataacaagcaaaagttatttatttatattttttattttttcattttttattttttgagatggagtctcacactcttgcccaggctggagtacagcagtatgacctcggctcactgcaacctctgcctcccagtttcaagcgattctcctgcctcagcctcccaaatagctgggattacaggcacaagccaccgcatccagctaatttttgtatttttgtagagacggggtttcaccatgttggccaggctggtctcaaactcttgacctcaagtgattcgcccacctcagcctcccaaagtgctgggattacaggcacgagccaccacgcccggccaaaatttttaattttttagatacaaaaagtttaaaaattaactgagcatggtcatcccagctactcaggaggctgaggtggaaggatcccttgaacccaggacttcgaagctacagtgaactatgattgtgccactgcactccagcctgggcaacagagcgagaccctgtctaaaaataaataaataaataaataaaatacagcaagccacgtgctaaaaacagtgccaagtgtcacgtgatgctacttttcagctattatgattcaccgatcgcatctgccacgggacatcaggcctcggtgggctcacagggaaggtggcggaagagctggcctcatcccaggtctgagggtcgaccctgaaccacgagagagagggagagagaaaaaggagtcccaaggctggcacacagctgtcctgagctggcttccccactcccgcttcccaccaccctgcctggccggtgcctgcattttcacccttagggctgcctccatggcacctgcaccagcccctgggaggagatgctggagctgcccagagctgggggcccgagtggaacacaagcccccatcctccactcttccccagtcaccctggcagcggggaggggaggggaagggaggggaggccaaggttacagagcccctccccctgcctggctataattagccccgagatgaattaaacatgaggctgggcttgtctgcagcagcggaggcagcagcttcgtccctgacactataattgttcccgggcagcaggcagaggacagggctgatgtgtgaggctgggggaggtggggacacactcactgggcacggctgtgggaacacagctgtgtggggcctgtggacgtctttggcaggtacacgcgtgtgcccgcatgcacatgtgtgtggtcctcaggactctccaggcacgagggggaaggggtggtccttgggcctggagaaggctcaaggctcaggaaccccgggatgaaggtagcagccccacaaggggcatggagggggcactctccagccccatctccagcagccctgcggtgggggtgggcggccaccattaaagctgccaacagccagcacggtggttcacgcctgtaatcccagtactttgggaggctgaggagggaggatcacttgaggccaggagttcaggaacagcctgggtaacatagcaagaccccatttctacaagaagtttaaacattaactgggtgtggtggcacgcacctgtaatcccagctacttaggaggctaaggcaggaggaacacttgaccctgaaaggtggaggctgcagtgagccaagatcatgccactgcctgggagacagagtgagaccctgtctaaaaaaaaaaaaaaactgccaccatcaggattcacaccttcgtgggaagccaccattccaacctcccgtcacgaagtcccagactccctcatccacagcgctatcgggcactcgggcaccgtagctgtggttccagcattccggccgccaccagccactgtcatgctgatgggaacccatcagtccagtctgcagtgaacatgcctgtctggttctgtctctcccaggctgggagccccctcagggctgggtctctggaccccgcatggcccagctcaggtgggattcccataatgggggaacacttctggggtctttggagtttggggaggtggagaggctgtggatgagggaagcatcctttaggtctagaaacatctgcaaattgatggacatccttgggcctcctggtcatcatcttcccactccaaaaactattatccatccattttataagggagggaaactgaggctgggagagagccagtgacctgcccaagtggcacaacgaggaaggcacaga[136 bp omitted]cggtgaaaacccgtctctactaaaaaatttttttaaaaattagccgggcgtggtggcaggtgcctgtagtcccagctactcaggaggctgaggcaggagaatggcgtgaacccaggaggcggagcttgcagtgagcggatatcgcaccactgcactccagcctgggggacagagtgagactccatcttaaaaaaaaaaaaaaaaaaaaaaaaaaacaccattatcaggctgggtgcggtggatcacgcctgtaatcccaacactttgggaggctgagaagggaggatcacttgaggccaggagttcaagaccagcctgggcaacatagtgggaccctgtctgtacaaaaaaattaaaaaattagctgagcatgggggtgcatgggtgtggtcccagctactcgggaggctgaggcaggaggatcacttgagcccacaaaggtagaggctgcagtgagctatgattgtaccactgcactccagcccgggccaaagactgagaccctgcctcaaaaaaagaaaaaagaaaaaaaagaccactattagtcactcacaccttcacgaatatggccaactccctaggagagaaccctggattggattccagctgggttcaaaacccaggctggaagcattatgaggtcttgggcttttggatggggtgagagagagaggagggtgacctcaggcctgctcctctcctctctgggcctcagtcttcccatccaggagatgggacaatggcgactggagacagtcttgttgggggcagggaagacggtgtcaggatctcattccgggacgcccgccacctggccctgtaccagtgaaattcatttcccggaccctggcccaagaaatggtgaaatctctccagcagcctgctgatagcaactttaagtctttctgcagagaggaagggaggtgagagatggggagaagagaggggagtgagaggcaggggcctcggtcagtctctcagctgtaaacactccctccctctactaggatcagtgagctatgattgtaccacagcactccagcctgggtgacacaatgagacccccatctctaaaaaaaaaaattaaaaattaaaaaaaaatttaaaaggccaggcatggtagctcatgcctgtaatcccaacactttaggaggctg[133 bp omitted]gagccaggagaattacctgaatctgggaggcagaggttgcagtgagccaagatcatgccactgcactccagcctgggcagcagagcaagactctgtctccaaaaaaaaaaaaaagccgggtgcagtggctcacgcctgtagtcccagcactttgggaggccgaggcaggctgatcacctaaggtcagcagtttgagaccagcctggccaacatggtgaaacctggtctctactaaaaatacaaaaattacctgggcgtggtggtgcgtgcctgtaatcccagctacttgggaggctgaggcaggagaatcgcttgagcctgggaggcagaggttgaagtgagccaagatcacaccactacactccagcctgggagacagagcaagaacctgtctcaaaaaaaaaaaaaaaagaaagaagaagaagaagaatgttttcctcattcacagcccctccacctccccagactcgaaagaccccaggagtatcccgccattataggatcccacccgagctgggatatgcagtgttcagagacccagccctagagaggctcccaggctgggggagacagaaccagacagaaacctcacagcccaaacaaccaggccctgtgcagggggatctggtggctgagtacacggggccccctacagacaaagagtgtttacacgtggtaaataaagacactcccggtgaggggaacagccgaggcaaacacatggaggcaaaaagcaaaaaaaaaaaaaaatcccaaacttcctttgggaagccaagacagacagatcacttgaggtcaggaattcaagaccagcctggccaatatggtgaaacaccgtctctactaaaaatacaaaaattagccaggcgtggtggcgggcgcctgtaatcccagctacttgggaggctgaggcaggggaattgcttgaacccgggaggtggaggttgcagcgagccaagatcatgccactgcactccagcctgggtggcacagcaagacttcgtctcaaaa[147 bp omitted]cggtgaaaccccgtgtctactaaaaaatacaaaaaattagccgggcattggtggcgggcgcctgtagtcccagctactcgggaggctgaagcaggagaatgacctgaacccaggaggcggagcttgcagtgagccgagatcgcgccactgcactccagcttgggtgacagagcaagattccgtctcaaaaaaaaaaaaaaaagaaagaaaagaaagaaacccactctggtgtctatggtgcattcaaaatgacaaatcccacagccagaaaggctcttgcaaagtaggggtgattgagaagagcttacaccccccgcccagagctattataaggataaaatgagataaggagagtgtgtaaacccccagcacatactcagtgcttgcagagcagcttttgcaaccatggcaccaatcaagcccgtgtagatcatttttttttaacagttatatattcatttcaatgtatatattcccccaaatttatatacagcatctactctactcaaaaaagatgtatatctgggttttcatggcaggatataaagggtgcattttagaaatagatatattttgtcggaaaacaatgagaggaggagtcggtttagagaaaaatgatggtgggaatgaaggaagcctggagtcaggaaccgctcagagtaatagatttctcagcctgttcctgggcccagtaattaatcctgaggggctaattaaattccagcttcctctctagccactcagcagcctccctcctggcctccctctcccccagggaggcccggcctggcccgcccctgccagagcctccctcctgctgaaccgccaggcccccagttccctgggcttaatcatcaggaattaaggtttaatcagaaggttgcctgagaggaacagcctcccaggtgtacagccgcaccaggaatagggtgagctcagtgaggcgggctcgagcaaacgcagggtcagagcctgtcattcacttcacacttagatattttgttcatcgtctatgttttcataatcatcgtgacttcttttttttttgagacaaggtcttactctgtcacccaggctgcagtggaatggcactatcatggctcactgcagcctcaacctccctacctcaagtgatcctcctgcctcagcctcctgagtagctgggaccacaggtgtgcactaccacacctggctaatttttgtatttttcgtagagacgggagtcttgctatgtttcctaggctgggtcttgaactcctgaaaccaagcgatccttccaccttggcctccccaaatgctgggattacaggcatgagccatcctgcccagtctcctcatgactttttttttttttttttgagacagagtcttgctctgttgcccaggctggagtggcgcgatctcgactcagcatctgcctcccaggttcaagcaattattctggcctcagcctcctgagtagctgggattacaggcgcccaccaccacgcccggctaatttttgtatttttagtacagaggaggtttaaccatgttgaccaggcttgcctggaactcctgacctcaagtgatcagtctgccttagcctcccaaagtgctggcattacaggcgtgagccaccatgcctggcccctcatgacgtttttcaatgttgcatcaaactactgtttatcttggtgactgagttgaacggcacctccttaaattttgcactgaggtgggtgccttgctctctttaccctaattctggtcccaactcctccacgcatgcacaaagccagcaactcctaagcatcttgagacctgaagctcatttcagcttcaccgctgtctgaggacaatctgttattgggcccattttatggatgagaaactgaggcccagaaggtcaagtcactggctttgggttccttggctaaggggaggcagaggcaggatttgaacccaagacgccactgagatggggttgctgcctgtcctgaatccagagacaatgcaacccgcttcagagcaccctttctgaagtgtttttgtttttgttttcttgtttgttagtttgttttgagaccaggctggagtgcaatggtgcaatctcggctcactgcaaagcaacctccacctcccgggttcaagcaattctcatgcttcagcctcccaagtagctgggactacaggcacacaccaccatgcccagctgatttttgttttttgtgtttttttgagacggagtctcattcttgtcacccaggctggagtgcagtggtatgatcttggctgactgcaacctccacctcccgggttcgagctattctcctgcctcagcctcccaagtagctgggactacacgcatgcaccaccacacctggctaatttttgtattttcagcagagatgaaatttca[142 bp omitted]tgtccctctagagaacctctagagaacaaatactttaatattaatctatcaggtatccttccccactttataccacccttatctagtctatgggggacactactaatctatcaagtaaccttccccacttcctgccacccccacctgtatgtggactacaatagaaagagagacttgaggctgaaggaagcccagcgtaggtatgaggacttgttctgggctttgacgcatccataggagttttctaggtatgagtagggtctgctgaaagggctttactgtgtatgcaaaagcctagagaagtgaaggagagtgtgactcattcatggactaataagtttgtctccttgaagctggagaggccttgaaggccagaaaaggagcctgaacgtcatcctgttcatcctgttcacagtgacacggtcacccaggctcaattccactccccatcttccagtttctcggcttcctccaacacccgacctagctcccaggtgttaaggtcagaagtgaatgcacctgtgaattagtgaaggaatgagtgagcagaggcagctgcttcaaggttgtgtggtgatacatccttctgaaccctgccccggtgcttcacggtacaggctccagagaggactcagcctgggaccctgcccccaaggatccccaggctgggactgtgggatggagctggacacagacacccaagctctgcagagtcagggctggtgctgagcgaccttggaggggaggacattggagctgcgtgcaaagcttttttttttttttttttttttttgagagagggtctggctctgtaacccaggctggagtgcagtggtgcaatctcagctcactgcaacctccacctcccggacccaagtgatcctctctcccaacccagaaggcggaggtttcagtgagccgagatcgcaccatcgcactccagcctgggcaacaaatatggatgtgggggaataggcaagcaggtaggtggatgtggctggctgcgtggaaagaacaggggtggtgggggcagccaaggatcaatcaggcactggtgagaagttctagcttcatcccgaaggcaatgggagccatggagggctctggacagaggagagacattgccagacccaggtgctcacaggaacccttctgggggctacagcggcaacagattgtgaagggaggtgattgcattggtctgggaaagtgacgatcatgtacctaaacccgcgttgtccaacgtgggagccactggccacatgtagctattgag[134 bp omitted]tctactaaaaatacaaaaattagccaggtgtggtggcacgtgcctgtaatcccagctacttgggaggctgaggcaggagaatcgcttgaacctgggagatggaggtttcagtgagctgagatcacaccattgcacttcagcctgggtgacaagagtgaaactctgtctcagaacacacacacacacacacacacacacaccccagaaaaaatagctcattcacaattttttctatagattgcatgcttaaatgataaaacacattactaaaactaatttcacctgtttctttttactattttttattttttgagacggagtttcgctcattgttgcccaagctggagtgcaatggtgtgatctcagctcaccgcaacctccacctcctgggtgcaagtgattctccggccttagcctcccaatcagctgggattacaggcgtgcaccaccacgcccagctaattttgtatttttagtagagaccaggctggtctcaaactcccgacctcaggaggtccgcccgcctcagcctcccaaagtgctgggattagaggcgtgagccactgcgcccagccttctttttactgtttttttcttgtggctaccaggaaatctttaattgcccacgttgatggcatttgcatttctaaaatgctgcagcctttgcaccgaccaccagagagtgctgtgcccatgtggcaggatcaagcaatccggaatctgaaggaaaagaaagtagttcaagctgacgatcagttagatcagttcttacaatggagacacgtttaccatctggcatctttcagcatctaagggagacagatctgcctggagatagggagtctgccgctgatcctcacaccattttatcctgct[132 bp omitted]ctgcaacctccacctcctggacccaagtgatcctcccaccccagcctcccaagtagctgggaccacaggtgtgcaacaccataccaggctaatttttgtagtttttatagagacagggtttcactatgttgcccgggctggtcttgaactcctgagctccagtgatgcctgccttggcctcccaaattactgggattaaaggcgtgagctacagcatttattagatacctactgtcaggcctctgagcccaggccaggccatcgcatcccctgtgactggcacgtatacatccagatggcctgaagtaactgaagatccacaaaagaagtaaaaacagccttaactgatgacattccaccattgtgatttgttcctgccccaccctaactgatcaatgtactttgtagtctcccccacccttaagaaggttctttgtaattctccccacccttgagaatgtactttgtgagatccacccctgcccaccagagagcaaccccctttgactgtaattttccattaccttcccaaatcctataaaacggccccacccgtatctcccttcgctgactctcttttcggactcagccggcctgcacccaggtgaaataaacagccatgcttctcacacaaagcctgtttggtggtctcttcacacagacgcgcatgaaatttggtgccgtgactcggatcgggggacctcccttgggaggtcaatcccctgtcctcctgctctttgctccgtgagaaagatccacctaccacctcaggtcctcagtccaaccagcccaggaaacatcccaccaatttcaaatccggtaagcggcctctttttactctcttctccaacctccctcactatccctcaacctctttctcctttcaatcttggcgccacatttcaatctctcccttctcttaatttcaattcctttcattttctggtagagacaaaagagacatgttttatccgtgaacccaaaactccggcgccggtcacggactgggaaggcagccttcccttggtgtttaatcattgcagggacgcctctctgattatacactcacgtttcaagggtgtcagaccacgcagggacgcccgccttggtccttcacccttagtggcaagtcccgctttcctggggcaggggcaagtacccctcaaccccttctccttcaccctcagtggcaagtcccgctttcctagggggcaagaaacccccaatcgcttatttccgcaccccaacctcttatatctctgcaccccaatcccttatttccacaccctgacctctttgtgccccaatcccttacttccgtgccccaaccccttctctgcttttctggagggcgagaaccccccaccccttctccgtgtctctactcttttttctgggcttgcctccttcactatgggtaagcttccaccttccattcctcctccttctcctttagcctgtgttctcaaaaacttaaaacctcttcaactcacacctgacctaaaacctaaatgccttattttcttctgcaatgccgcttgactccaatacaagctcgacagtagttccaaatagccggaaaacggcactttcaatttttccatcctacaagatctaaataattcttgtcgtaaaatgggcaaatggtctgaggtgcctgaagtccatcagtcccttcctactctctgtgcccagtgcaactcgtcccaaatcttccttctttccctcccacctgtcccctcagtcccaaccccaagcgtcgctgagtctttctcatcttccttttctacagacccatctgacctctcccctcctcgccagcccaagctaagtcccaattcttcctcagcctctgctcctgcatcctgtcatttttttatcgcctcccctcctcacacctggtccggcttacagtttcgttccgtgactagccctccccctcctgcccagcaatttactcttaaaaaggtggctggagccaaaggcatagtcgaggttaatgctcctttttctttatcccaaatcagaagcgtttaggctctttttcatcaaatataaaaacccagcccagttcatgacttgtttggcagtaaccctgagacactttacagccctagaccctaaaaagtcaaaaggccgtcttattctcaaaatatattttattacccaatctgctcccgacattaaataaaactccaaaaattaaattccggccctcaaaccccacaacaggacttaatgaacctcgccttcaaggtgtacaataatagaaaaaagttgcaattccttgcctccactgtgagacaaaccccagccacatctccagcacacaagaacttccaaatgcctgaaccgcagcggccaggcgttcctccagaacctcctcccccaggagcttgctacacgtgccggaaatctggccactgggccaaggaatgcccgctgcccgggattcctcctaagccgcgtcccatctgtgtgggaccccactgaaaatcggactgttcaactcacctggcagccactcccagagcccctggaactctggcccaaggctctctgactgactccttcccagatcttctcggcttagcggctgaagactgacgctgcccgatcgcctcggaagccccgtagaccatcacggacgccgagcttcgggtaactctcacagtggaaggtaagtccgtccccttcttaatcaatacggaggctacccactccacattatcttcttttcaagggcctgtttcccttgcctccataactgttgtgggtattgacggccaggcttcaaaacccctgaaaactcccccactctggtgccaacttagacaacactcttttatgcactcttttttagttatccccacctgcccagttcccttattaggccgagatactttaaccaaattatctgcttccctgactattcctggactacagccgcatctcattgccgcccttctccccagcccaaagcttccttcacgtcttcctctcgtatccccccaccttaagccacaagtatgggacatctctactccttccctggcaactgatcacatgcccattaccatcccattaaaacctaatcacccttaccccgctcaacgccaatatcccatcccacagcatgctttaaaaggattaaagcctgttatcactcgcctgctatagcatgggcttctaaaacctataaactctccttacaattcccccattttacctgtccgaaaaccggataagtcttacagattagttcaggatctgcgtcttatcaaccaaattgttttgccatccaccctgtggtgcccaacccgtaccctcttttgtcctcaatccgttcctccacaactcactattctgttctccatcttaaagatgcttttttcactgttcccctgcacccctcgtcccagcctctctttgctttcacttagactgaccctgacacccattaggctcagcaaattaccaaggctgtactgctgcaaagcttcacagacagcccccattacttcaatcaagcacaaatttcttcctcatctgttacctatctcggcataattctcaaaaacacacgtgctttccctgccaatcgtgtccgactgacctctcaaaccccagcacctacaaaacaacaactcctttccttcctaggcatggttagcgtggtcggaattcttacacaagagccaggaccacaccctgtagcctttctgtccaaacaacttgaccttactgttttaacctagccctcatgtctgcgtgcagcggctgctgctgctttaatacttttagaggccctcaaaatcacaaactttatcagtcctccaggcccaagttgactctttagctgcagttgtcctccaaaaccaccgaggccttgactgacttactgctgaaaaaggaggactctgcatattcttaaatgaggagtgttgtttttacctaaatcaatctggcctggtgtatgacaacataaaaaaactcaaggatagagcccaaaaacttgccaaccaagaaagtaattacgctgaacccccttgggcactctctaattggatgtcctgggccctcccaattcttagtcctttaatacccatttttctcctccttttcttcagaccttctatcttccgtttagcttctcagttcattgaaaaccgtatccaggccatcaccaatcattctatacgacaaatgtttcttctaacatccccacaatatcaccccttaccacaagacctcccttcagcttaatctctcccactctaggttcccacgccgcccctaatcccgctcgaagcagccctgagaaacatcgcccgttctctctccataccaccccccaaaaattttcgccgctgcaacacttcaacactattttgttttatttgtcttattaatataagaaggcaggaatgtcaggcctctgagcccaggccaggtcatcgcatcccctgtgacttgcacgtatacatccagatggcctgaagtaactgcagatccacaaaagaagtaaaaacagccttaactggtgatattccaccattgtgatttgttcctgccccaccctaactgatcaatgtactttgtagtctcccccacccttaagaaggttctttgtaattctccccactcttgagaatgtactttgtgagatccacccctgcccaccagagaacaaccccctttgactgtaattttccattaccttcccaaatcctataaaacggccccacccctatctcccttcgctgactctcttttcggactcagccggcctgcacccaggtgaaataaacagccatgctgctcacacaaagcctgtttggtggtctcttcacatggacacgcatgaaacctactgtgtactttgctttctttgctcttggtgattccccaaaaaacttatctcaacatataaggatttttcttttctttttttttttttgtttgagacggagtctcgctctgtcgcccaggctggagtacagcggcgcgatctcggctcactgcaagctccgcctcccgggttcacgccattctcctgcctcagcctccggagtagctgggactacaggcgcccgctgccacgcccggctaatttttttgtatttttagtagagatgggtttcacc[140 bp omitted]caaggctcagagaggtcagtggtgcaatctcggctcacagcaacttccgcctcccgggttcaagggattctagtgcctcagcctcccaagtacctgggatcacaggcatccgccatcacacccagctaatttttgtatttttagtagagacagggtttcgccatgttgtccaggctggtctcgagctcatgacctcaggtgatccgcccaccttggcatcccaaactgctggggtaggattttcttttttacttccctttttccaaatgagaaaaccaaggctcagagaggaagagcgtgttgccccaagtggcccagcagagccacagccttgcccccagcagctctggctctaatgcattccagactcctcccatcagccaactgcctcccatcctctaataaacttctgagaagcgctgggcagatgcagtggcgcccacgctctttatctgcccagatcaggccggctcagcagagcagtcgataattaattctgaattctccccatttatcacggcggcaggagccagagtgcctggaatcccaatcccaaacctccgtgccccttggtcacctggaccaaggcccagtggtggcaggaactatggtggagagggggcctcattgagcctgggaagggagcaaaggtgttcctggctccccaccgctccctggcgctgggttattaaacgctgtgtactgcagcagtgaccaaaccagacctcttccccgtcttcatggtgcccacaggctagtggggaaaacatacattgaatgaataataatataaataattaatgctacaaaggaaaagaacaagatgttgtgagaatacaaaacaacaggaacataacttgttttgggggcctccccaaggaagtgacattgaacctgcaaatcacagggtgaaaggtgaaaggttgggagagggtatttcatatacagaaatagcccatgcaggctgggtgcggtggctcacagcactttgggaggcca[134 bp omitted]gagacaggattctcacctcctggttcgcttgaacccaggaggtggaggttgcagtgagctaagatagcgccattgcactccagcctgggcaacagagctagactctgtctcaaaaaaagaaaaaaaagaaagaaaagaaaagaaatagcctgtgaaaaaaaccttgtggctggagcccagcaaggggtttagtaggtctgaagcttaaagcacaagtgtgaggtcagtgccaagtcaggggacctcagggccaggcctggagccctcatagtgaggccagcagccttcagtggatagccaggggccaccaaggaaagagatggataagtttccgtgatgctccaaggggtggtagtgaggctgcttctgccccaggtgcatcaccctgcaaggtcagtggtcggctctgtgttgttttttttttttttttttggtttgtttgtttttgagacggagtctcgctctgttgccaggctggagtgcggtggcgtgatcttggctcactgcaacctccgcctctcgggttcaagcaattctgcctcagcctcccaagtagctaggactacaggcgcctgccaccacgcctggctaatttttatatttttagtagagacagggtttaaccatgtcggccagaatagtctcgatctcttgacttcgtgatctgcccgcctcagcctcccaaagtgctgggattacaggagtgagccactgcgcctggccgggtttttttttctttcttatgactgttttcctttttgagggttctttcaaatccatttgggcacgggggttagtcaggatttgtctgccagcaaacaccgaatgcctggctatcccaaacacttcccttcttgggcaggcagggaaactgaggcccagcgagggacaaagaacacccaaggtcattcagaggaaggttgtgtgtgggagaggtttctggggagtctcaggggccatgcgcttgccctgcagcttctgtggcttttgttgggccgtgaactccgtggggagcttgactgggtatcctagtcaccacgctgtcctcagagccctgcaaactggaggtgcttaatcagtgattgtggaatgcatgatcccagcagcttctgaagacaccccagaggtcatgcttacgatattggaaggaaagggggtctttttttctttttctttttttttgagatggagtcttgctctgttactcaggctggagtgcagtggcacaatctcggctcactgcaagctccgcctcccgggttcacgccattctcctgccttagcctcccaagtagctgggactacaggtgtgcaccaccaccacgcctggctatttttttgtatttttagtagagacagggttttgccatgttgcccatgtccaggctggtctcgaactcctagcctccagcaatcctctagccttgacctcctaaagtgctaggattacaggcatgagccactgtgcccagccaactaatgttttcattatttattttttaaattttaatgttatatttcttaattttttattttatttttatttatttatttatttatttttgagatggagtcttgctctgtcgcccaggctggagtgtagtggcgcaatctcggcccactgcaagctccacctcccgggttcacgccattctcctgcctcagcctctcgagtagctgggactacaggcacccgccaccacacccagctaatttttcactgtgttagccaggatggtctcaatctcctgacctcgtgatccgcccgcctcagcctcccaaagtgagccaccgcgcccagcctattttttctttttttttttttttctagagacagggtctcgttctgtcacccagtctggagtgcagtggtatggttatagctcaccgtggtctcaaactcctgggctcaagtgatcctcctgcctcagcctcccaagtagctgggaccacaggggcatgccaccacacctggataatttttaaatgcttttgtaaaggctgggtctcgccatgtttcccaggctggtttcgaactcctaggttcaagcaatcctcctgcctcggtctcccaaagtgttgggattatagtcatgagccactgagcctggcctagggaaagaggggtctttttcaataggagatttgagaaaaaaatacagagacatggagagagacagagactgagatgcagacgaactgagaaacgcagagagagagatattgaagagagggagagataacgagatacaaacagaaccacagacagaaatggagcgacagagagcagatgaaaaagaggccgggcgcagtggctgatgcctgcaatcccagcacttcgggtggccgagacgggtagatggcttgagcccaggagtttgagaacagcctgggcaacatggcgaaaccccatctctacaaaaatttaaaaattagctgggtgtggtggcgtgtgcctaaaatcccagctactcaagagcctgaggcgggaggatcgcttgagctggggaggttgaggctgcagtgatctgtgattgtgccaccgcactccagcctggacaacagaacaagaccctgtctcaacaaaaataaaataagagactgagacacagagacagatgaagggagaggagagagagagaaagaaagatggcaaggtcagaaccagcactaacttgtatgggagctgttggatgaattacaaagaagggccccttcctggggccctctcacctctgcagctgggtcctcttgtgcagtgaacaacctgccccactgtctgtggcagccggagcagcatctgtctttatatctctcattgaatgaatgctcagagttaggagaatgccagagcccagcctggagtcgcacagaaagagaacagagagatagaggcagggcaggaaggaagtggcaattccaggtcctggcagtttctggctaaaccgctgacatctcctctgggaaccgcctgggctcacttgccccctaggagaattcccttggaccttcttggagcacaaactaggtgggcggccaagacgggaggtggcccctccccagaacgccgcgggccttagcgagacggcagctgccaagtctcacccgaaactcctcatagcccagacttgctcagggtggagcccagagtctgagaggccctggcggggagcgagcaggattccctgagtttcacagcccagatatgggagggggctggcctggggtcaactggagtaacagtgtcacctggagtaacagcgtcacctggagtaacagcatgtgcaaaggcctggaggggagtgagaggaaggtagaagtagagctcagcccaaaaccatagatggggtagaatgaagcccaagagagctccaaggccaagttaggaagcttaaactcaatcttgttttcaaacatgtaatcttttattcagtacactctcaaaacagcatttctgtatctagttccaagctgggtgatcctgcggccccaaaggtagtgatgactctgctgggaggagacacagacctcccagttcagtggatcccgagtgagtcagaaggtgagactggaagcagcagggtccttgagggaagtaggctctccttgaaggataagcaatggctgcatgaagtagcaggtattgaagctagggctttgaaggatgaataggagcttgccaaacaaagaaggtgggacatgcaaaccaagtggagggactgtggcccaaactcagggatacatggatggagtagcaggagaaaaacagactgggggagcaggaagagtcagtgtgagctttctccagatccaaaatcagcagcctgtcattcaaggccaagacattccacaatagttccccttggccctgtcaagcctatcaggcctggagcttcctcaaagcagctctgacaactccagccactgtcatctcccctctttgtgtcacgaggaccatgcactttggtgcatggtgacattcagtgggggctgctttcctcggtgtggctgtgggaccttaggcccatgcctcagtttcccaacctggaaaatgggctgcaggaagccacttttgcaacttatgtttatctcaggccagggaggtcttggacaaatgatgtgaaggaagaagagaaaaatggaagatagggagggagaggaaaggaagggggcgaaggaagggagaacagatgggaagggaagggaagggaagggaagacggaggaaggaaaaggccgtgcacctcccgacccaggtcatcatcaagggacaggtccaacattattatttcagaacatgccagcgctgtcgaggcttaagaaatgggtggtgatttgcatgcgatttgcatgtgatttgcatactgtttgttaaatgtcaaaacaccctgaaaatgctttctcccacctccacccccagtggagaagcgggaaacccttccccacttcctccaccagctcccggcatgggttggggacgcctcagttcagagggtggtgaccttgggcaagccaaaagccatctgtaaaatgggctgttatcctg[138 bp omitted]gcctcagcctaccaagtagctgggactacaggcgcccgccaccaggcccggctattttttttgtacttttagtagagacggggtttcaccgt[138 bp omitted]aagtcctggcatggagtaaggaccaaggaatgaaactggggagattattaaatgccccattttcttgccaaaccctgacgaggcatgtccctgaatatgcacagggaaatgaggacagaggggacccaggctctagatacacgcatgtggcccagctgttagcagaggcccaaaccacgcatgagcagggatctgggctgcctccccctgctgtgtgtccctgacaacctccttgggcctcaggctaccctctgcagaacagacagcagcagactctgctctaggaggagctccagggggcacacagtgggtctctggggacaaagtcctgggttaggcaccaaggggagaggtggagggggataggaagacccccctccaggcacacccaggggccagcaagacccaagtcattctgcaaagcagctccagcaggtctgcctgccggagtgaagtggggctcctctctcttcccctccttctccccctcctctcagccaagcgggaattgcagggtagatgcccgaagtttggcagatgctctgaagggaggcgagcaggagaccccgggccaagtgctgtccccgagctaagcaaacgcacagtctgggcacggctgtccccgtggtggtgatttactatccacctgtccatgctctgagtcctgcagccaacaggactcttaactaaaacattatttcttcccagcctctggcgcctccgcccatggtgcctggagagtgtacacggccctcgaggacatgcgtagcctcggcaccccctccccaaagaccctccccaggggctgcgcaacgatgacgtggctgcaggtcagaggtgcaacggaggcccggcacactgccctgagggtctccacccggaattcccacaacgcactccctgcaatgccccgcgatgacctcccacagctaggcccagttccccacccccagatcctcgtcctcttggccagagttcttcagaaccccttccccgctgccccaagaccctatgcaagacgaggcatccggatttaaggggaagggggaaacagcccagggggtgggcacaggtgcctcctggggaggtatttgggggtggaaatggggcacagttggaggcctgagaaggagctaggatgtccgcatctccccgcttagtcattggagagttcggacacgactggctgcacccccagccagggctgttcactgcacaaagggcctgtgggggccccaaagaaggctaggtgctctctggctgggaaggagggaatctgagaagacttcctggaggagactgcaatcccaggtgtattggagctgcagagaagaggttgaaaagtgctccaggcagggggcacggcttgggcaaaggtgtggctgggaaaatgtcctgggcaagagcggaagtgcctctgagtgtctctcctgccccttctgtgcttctcttcttgcgatgccctctggctgcccatgggagctttccaaggtggcacagtgctttccactgaagacagggcacccagggccccaagaggggagcaacaacctcaaagtcacacagcagagctgaaaggctcaaggctccctcccgataggctgggcaggagcaaaaatgtcctaggtccttgtcagggactggggctccagcaggagtgtctgaagcagtgtgcatcagctggtcaggccagggtttcatggtccacctgggagcccagaccctggaacaacaggaggggaagggtaaacccgtttcaatccaggaccagggaagggtgaaacaccagttctccagccatttgtcctttccttttacctaacatccctgacacggacagtgatctgcagtcatcccctcctgtggatgtcccttgtgtcctttaagaggaacagggatggcccctggtgaatttggctgttttcttttttctttcttttttttgagacagagtcctgctctgtcgccaggctggagtgcaatggcgtgatttcggctcactgtaacctctgactcctgggttcaagcgattctcttggaacttggctgttttctgccacctgatggcagtcacaggaattgcaggcaaagagtgcagtaaagccaaatcaaagctcaatcctttattgtaaggagacaggtaacagagcccagagaggagaagcaattttcccaaggtcacccagcaagtcaggggcaacacggctctggtccacgtgttagtccaaaaagaaatgagacaccaaggccatgtccctaccctagaggccagaagcataagtgtatggagggggatgatggtcaataacatctgtctcttctcctctctgggcctcagtttccccatctatggtctccacaatctctaaggtcctttctctttctcaactactacaattacttacctggagtgagatctaggctcccgggaggcaggagaagtgccttccaaaagtgccctctaccccagcctattccttcagccagtacccaggtccccttggtcatggctctgcctcctccaacccagactacctgaaagagggagacagaaagacacaggttgcagaaaaaacatagcccttgccttggcgttcaaggcttccctattctgcccactgtctggctggtgcctcttcctgcccctgccagggctcacctctgacccagaaattccctcccctgcatccaggcaccgctagagctccagaaaaatattctgagcagcccaatccttgcctctgctcacgattatgttagtgagacaatacatctcactaacatttattaagcacctactatgtgccaggcactgaactggcaatccagcagggaacaagatggacggcagtaccctcacagagtttacagtctactgcaggagacaggtgaaaaaaataagtaaaacgtagagaagtcggctgctgacaagtgatggggaaagagagaaagcagggatggcgtgaaataaaattttattatttatttctttagagacggagtttcaccctgtcacccagactagagtgtaatggcacgatctcagctcactgcaacctccgcctcccagactcaagcgattctcttgcctcagcctccccagtagctgggattacaggcatgcgccatcatgcccggctaatttttgtagttttagtagagatggggtttcaccatgttggccaggctggtcttgaactcctggactcaagtgatctgcttgcctcagcctcccaaagtgctgggattgcgggtgtgagccgctgcgcctcgctggaatgcaattttaaacaggatggtcagggagggctgcaggaagagagggagttggggacctgagggaacagcattccaggctgaaggaacagcctgtccagaggctctgaggcagcgaggaggcctgtgtggctggagcagagtgaggaaggggaagagagggaggaggagcaagcagggagggaatacagcaggtcatccagggtcttgcaagcctcaggaaggacttgggctttgaccctgagggaggtgggagccatggagggctgccggcagaggagggacacgccccgactcaggggctcacaggcgccctctggcacctgctacggggaggacagacttgtaggggacaagggcaggggctgcggaccttggtggggggcaactgggctgggccaggggttgagaagtgggaggattatggttagactttgaaggcggagctgatggaaccagctgaaggacagatagaggggcttgggaggaagagaggaatagactgatgtcaataaaatcagaataataacaactgttcccactaatggagcagggagaaggtttagtgatgaagggcgtggctttaaagctgggtttagaccctggctctgccccttcccagcttaatcttactctgcctcagcttctccacctgtaaaccgccaatgataacggcacccggccaggcacggtggctcacgcgtgtaatcccagcactttgggaggctgaggtaggcagatcacctgaggttaggagtttgagaccagcctggccaacatggtgaaacggtctctactaaaaatacaaaaaaattagccaggcatggtggcgggcgcctgtaatcccagctactcaggagactgagg[132 bp omitted]gccaggggacagcggtaaggccacgtgaaaagcccctagcatctcaaaggctctcaaagcatgaccatgactcagtgcctgctagctcccgtgacaacctgtctccctgcaacgctgctgcctcgaggcagaaaatgttgtcactactgcatttcacagagtgtagaaacaggaggtggcaagagaggctgggggagggagaagagggggccctatctacccggaagtgagagagggcctggcaggtttgtcccgagcagcccacgcagcttctctctccctagggtaccgtctgcgctgacaggtcccaagtgtttttctcatttctcacatggggaagctgaggcctccccggctgctgctgcaccatccactagtagcccctgctctgcctctagaggtctgggagtggtctggggagctcagaacccatttgatgcccagagagggtgggttagctgcctcgggacacacagccagtgaacagcaaaggcagataggggcccctgtctgttggggaagacaaagctggactctgccatcaaccccagctgtgtgtgtggtcagggatgggcaaggggcagggcattaggacagggtgggagcccagaggaggttgaaactctctcttttttcttttgttttgagacggagtctcactctgttgtccaggctggagtgcagaggcacgatctcagctcactgcaacctccgcctccaggttcaagcgattctcctgcctcagcctcccaagtagctgggattacaggcgtatatcactatgcctggctaatgtttgtatttttagtagagacagcgtttcgccatgttggccaggctggtctcgaactcttgacttcaggtgatccgcccaccttggccccccaaagtgctgggattgcaggtgtgaaccattgcgcccagccaaaactgtctcctctgaaggcttctgttctctgcctccagcatggctcactgggacctcaccctggtctcctgtctccagccctccccccatcacagtctgttctccccgctgcagccaggggttgcctgtgagcattgagtcaggtcccgtccctcctctgcccacagccctctatggctcccacctccctcggagtcaaggcccaagtcctccctgcagtccgcaaggccctgcatgaactgccctggcccctccctgccctcccttcctccctctctcccccttgctccagccacacgggcctcctcgctgttcctccaacatgccaggtgcagtcctgcctcagggcctttgcacaggctgttcctactgcctggaacacccttccctgactctctgtttaaccacctcctccacatcatagcctgacatgtcacctttccggagaggcgtcccccagtcactgatccctctccaccttccctgcatcccccacagcgccaattgcgagttgacattctcctgtgctattatttggctctaggctctgtgaaggcgaaatctggtctctctgggtcactgctgaatttcagtgtccagcatggagtctggcacacagtaggcacacaataaatgctgactctgtactgcataattacagtctggacgtctgagggtcgtccagcccccagacctcatagaaggtacgctgccgagaacaccctctcctagccccaagctctgaacctccatccctcatcatcctctcagcctccccgtccccgctaagatcttccctcaagagggcctggggagggggcctctcctgcccccattgcagccccagactcctgcaacggggtggcatctgaggctcctgccctcaaaacatcaacccaggctcggtgactcaagcctctagagggctggtgaatgtgacccccataaaatccagggtaattcacatggcccccgtccctctcctgttcaatgcttccaaggaggtggtcccaggctctgagacgaggccccaccatcttcaccacctctcggccatcctcgacccatttcccagagctgccccaggccggcagtgagctgttcccgtggccccagcgcccttctctgcagacccctccttgggccagaagacgccccacttgagggtcgtcttggccaggggacctctttggggacccagatatccaagtgtgagtgtgggtaacggacactggagtggggctgtgggaaagataaggcggtagggagagaccagagaaggaagagagagacagagcttcagagacagagaaaaacagcagagaaaaatgcagagacaccagagagataaagagacacagacacacatgttgagacacagcgagaaaaagagcagagaccaaaataacagagacagagacacagagagagaaatacacagcgggaagagacagaaatggacagagacacgcagagaaacagagagacaaaagagacacacagagagaaaaagagcagagacagaaatggagagagacagagaaagagagacagaaatggagagacacacagaggaaagaaagcagagaccaaaatgggcagagacacagagagagacagagacaaaagagacagagactcacagagacacagagagagatgcgcgcacacacagacagaactggacagggacacagagacagagacacagagagacagagagaaaaacagcagagacagagacaaatggacaaagagacagagagacagggagagagagacacacacatacacagacacagagaaaaacagagacaaaaatggacaaagagacaaaagagacagacacagagagacacaaggagaaaaacagcagagacagaaatgggcagagacacaaagagacaaaggggaagagagacagagacacacacacagaggaaaaaagcagagaccaaaatggggagacagagaccagagagggagacagaaaagagagagggagacagagatgagggagaaacagggaggaaaacagcagagagagaagtgggcagagacacagagtgacagagaaaagagagacagagacagagacaatcacaggcaaccaaatcatcagggaaagaaataaacagaggcagagatggagagagacacacagagaggaaaaaacagagaccaaaatggagagagagacagagacaaagacaaaagagagagaggtgaggagacaaagatgagagacgcagagataaaagagacagagacaagagacagaaacaagagggagacagagataagagatggagatgagacagccacaaaagagatgagagagacaaagatgaaagagacagagataaaagagagacacagacaaaagagagagatgaaagagacaaagagaggcacagagataagagtcagagacaagagacagaaagaagagggagagagatgagagacagagacaaaagaagaagagacagagatgagagacagagacgagagagtgacaaagatgagagtgacagagacaaaagagagagaggcagaaaaacagcagagacagaaacaggcagagaaacaggcacagacagagagcccgaaagcaagacctgacaccggcaaggccgggtcaggagagaggccgggcgggcagcgcgaggtgggaaagcagtgccggcccgggaggccgccttgggcgcccgcctcccccgccgctctccaggggtccccggccgccgcccccgccccaccccaccccgagccccgcggccacctggggtcgctgacgagcagcagcaccgagccgtcctgcaggcgcgcgtcgcgcaccgtctggtggtcgtccagccgccgcgcgttgtagtagaaggcgcgcttccaggagctcacgccctggcccaccagctgggcgcgcaggtcgctgagcgtgtcccgcggccgcacggtcagcggtagcagcagcgcctcgtccgccaggtgcaccttgatgtggtagcgcttccagcgcgacagcccccgccgcagcccctccatggcgcccgcccggctccggctccagctctggccccgggccccgagcgccccgcgcacccgcccgactagcctggccgcccgcccccgccgcgcccgcgctccgcccgcccggacacgcccggcacgcagtgggcaggcccggcccggcggggcggggcgggtgccacggtcccctcaggcgtccgctccccactgctggccccagagtgcgcccgggggtctagaggcggagtggccactcagcacagagccatcagcgaggtcatcccagccaaggagacgcgcgaatgtccagggggttacatggtggaggctccagggagggaggctgggaggccactttatttgatctttttaaggacaggctggagcgcagtggcgcaatcatggttcgttgcagccttgacctcccgggctcaagcgatcctcccgcctcagcctctcaagtagctgggactacaggcgctgccaccaagcccagctcacttttgtagtttttgtagagatggggcctggccgtgttgcccaggctggttttgaactcctgacgtcaagtgattctccgccttggcctcccaaagcggtgggattataaccctcagccaccacgctcagcctacattaaaaaaaaaatttacttttaggccaggtgcggtggctcatgcctggaatcccagcactttgggagactgaggtgggcggatcacatgaggtcaggagttcgagaccaacctggccaacatggtgaaaccccgtctctactataagtacaaaaattagccaggcgtggtggcacatgcctgtagttccagctactcaggaggctgaggcagaagaatcgcttgaacccgcagacagaggttgcagtgagccgagattgtgccactgcactccagcctgagccacagagcgagacttatcgcaaaaaaaaaaaaaaaaaaaaaaaaaaaaaaaatggccgggtgtggtggctcacgcctgtaatcccagtactttgggaggcccaggtgggcagatcacaaggtcaggagatcgagaccatcctggctaacgcggtgaaacccccccgtctctaccaaaaatacaaaaaattagccgggcgtggtggcgggcgcctgtagtcccagctactccggaggctgaggcaagagaatggcgtgaacctgggaggcggagcttgcagtgagccgagatcgtgcgccactgcattccagcctgggagacacagcgagactccgtctcaaaaaaaaaaaaaaaaaagaaagaaagaaagaaagaaagagggagagagagagaaagagaagaggaaagaaagaatgaaagaaagaaagagagagagagaggaagagaaggaaaaaaagagaagggctgggtgcaggggctaacgcctgtaatcccaacactttgggaggccgaggtgggcagatcacctgaggttgggagatcgagatctacctgaccaacacagagaaaccccgtctctacaaaaaatacaaaaaaattagccaggcgtggtggtgggtgcctgtaatcccaactactcaggaggctgagccaggagaatcgcttgaacccaggaggtggaggttgtggtgagcggagatctgccattgcactctagcctgggcaacaagagggaaactccgtctcaaaaaagaaaagaaaagaaaagagcacctgctaagtgacagacagtcttctaggtactttattggggtgggggaagcatctcttacttttctcatgacactatgacttcccattttacaagtgagaaaactgaggcatagagaagaaaagagatttcccagaggaaacagagagaaaagtggcagagctgggattcgaacccaggc[132 bp omitted]gcaacctccgcctcccaggtgcaagcaattctcctgcctca[131 bp omitted]gccttggcatcccaaagtgctgggattacaggtgggagccacctcgcccagcccacaaacatcactcttacacaaccatgagagttcagatggaggtttctagtttttattattattattactatttttgagatggagtctcactctgtcactcaggctggagtgcagtggcaatatctcggctcactgcagcctccgcctcctgggttcaagcgattctcccgcctcagcctcctgagtagctggaattacaggcgtgcgccaccacgccaggctaatttttgtatttttagtagagacagggtttcaccatgttagccagggtggtctcaaactcctgacctcaagtgatctgcctgccttggcctcccaaattgctgggattacaggcgtgagccaccacgtccagccttttttttttttttttcagatggagattttaaagataactcaaaccaaattaaattccagatggccccttcaacccttgcccccagcgaaataaactatacaaatattaggagaaaacacaggagttaaaaataaaaataatctgggccaggcgcggtggctcatgcctgtaatcccagcactttgggaggc[134 bp omitted]gaggcgggagaatcacttgaacccgggaggtggagctggcagtgagccgagaccacaccattgcactccagcctgtgtgacagagtgatactccgtctcaaaaaaatataaaaataaaattaatcttaactgtgttaaagcatattaaacccagaaacctttaattaaaagattaataactgactacaaatataaaattcctacacacatatgcacattaaaaaaatactagaagatcaaaaggcaacatcaaggaagaaagttttccaaaacacgacagacaaaagactgattttcttaatatgtaaagagcatctggaaatcaataaggattaacaagcaaattgaaaaaggggtgagagactgggcacagtggctcactcctgtaatctcagcactttgggaggccaaggtgggtggatcacctggggtcaggagatcgagaccagcctggccaacatggtgaaaccctgtctctactaaaaatacaaaaattagccaggtgtggtggtgggtgcctataattccagctacttgggaggctgaggcaggagaatggcttcaacccaggaggttgaagtacaatgcccagggtggagtacaatggcaactgtggagtacacagttgcagtgagccaagattgcaccactgcactccagcc[138 bp omitted]catggagaaaccctgtctctactaaaaattcaaaattagctgggtgtggtggtgcatgcctgtaatgccagctacttgggaggctgaggcaggagaatcatttgaacccaggaggcagtggttgcggtgagccaacatcgcaccattgcactccagcctgggcaacaagagggaaactccatctcaaaaaaaaaaagaaaaaagaaaaacaaaacaaacaaataaaaaatactagaagatgaagaggcaacatcaagggggaaaatcttccaaaacatgatagacaagagactgatatccttaatatgtaaaaagcatctagaaatcaatatggattaacaagccagtccaaaaaagggtgaaagacatgaatggatttttgttgttgttgttttgtttttgtttttgagcaaacagggtcttgctgtttcccacactggaatgcagtgacacaatcttggctcactgaaactgtgtaccacccctcccggctaattttcagtatttttagtagagacagggtttcgccatgttgcccaggctggtctcgaactcctgggattcaagcaatcctcccacctcagcctcccaaagtgctgggattacaagcataagccaccacacatgaacggttttctgaaaaggaaatacaaacgtcttctgggcataggcaagggagttcattctcgctcatggtaacctaaatataaaaaaaaactaccatgaaatatctttttcttcttttcatctgtctggctggtaaagatgaaaaagtctgagcatttgctgtgttttcagggttttgggaaaagagcagcctcatgctgctggggttcagagtgtgaaatggtgtaagctctctgacaatagctatttgaaaaaggtataagccagcagtgtcctttctgggaaggtatccgtgtgcacaaagagagatgataacataatacatgtgccaagaaatttacatgtaacacagcaaagtaggaggctggcatgatccctgacctccttgaacaaaggagggaaactgaggcccggagaggagtagtggcagaatgagaacccaggctgggctggtcactctccggggaaggtgggcgggctggcttaacctgaagaactaggtcaccatggccccagccacttccctattcaggctgaattccaggcctcgcccatcataattgctggtgtccaagaaggtcaaagggaggcctggggacactcggctttaacacggggaggccacgctgagccctgggagtgctaggtgccacttccagttaattctgactttctcattaagctgttaggaaaagctcggtggctgtgggcgaccggcccctgtgcctgggtctgtggattagagggatcatggtttttgcctcgagacactgtattatctgttgcgggcaattatggaagacccaggcagacagtgatgagctcagagaatccctgagctctggagtctggaggctcagaatcgtgggatcactgaacatgtagacacttaggatcttagaacagctggtgttcagtcctcctgaacaatgtggaatctcagagctctctagtgggtgggtgggggctctgagcggtaatcaccatacatcccctctggctgtcttaggggagaaaaagctgcagtagtaagttttaataaagttcagcaggaagca[133 bp omitted]aaggccctgactctacaatttttttttttttttttgagacggagtctcactctttcacgtaggctggagtgtcttttcacctaggcacgaactcagctcactgcaacctccacctcccaggttcaagcgattctcctgcctcctgagtagctgaggttagaggcatgcgccaccacgccaggctaatttttatatttttagtagacacggggtttcaccatgttagccaggctggtctcgaactcctgatcttaagtgatccgcctgcctcagtctcccaaagtgctgggattacaggtatgagccaccatgcccggccagaattttaaaattagctgggcgtggtggtgtgcgcccccgtagtcccagctactcaggagactgaggcaagtggatcacctgagaccaggagttggaggctgcagtgagctatgattgcaccactgcactccagcctgggcaacagagcaagaccctctctcgaaaaaaaaaaaaaaaaagaaagaaagaaatctcttctacattacaagaggcaaagtatctataattccagaatgtggcaatgctaagggcagtggatatgttacagatgggggcaagtgggcctggcacccaccctccttccctatttgcctacaggattggtggaatatgcagccccccccaacccacacttctccctgctgcccagcctctgatgaacaggcattctggcctatattattattattatttatttttatttatttatttatttttttgagacagagtcttgctctgttgcccaggctggagtacagtggcacgatcttggctcactgcaagctccgcctcccgggttcacgccattgtcctgcctc[202 bp omitted]ttttatcttattttactttatgaaacaggatcttactctgttgcccaggctggagtacagtggcatgaccatggctcactgcagcctcaacctcccaggctcaagcgatcctcccacctcagcctcctgagtagctgggactacaggcacacacctgtaatcccggttgtggtggcgggtgcctgtaatcccagctactctggaggctaaggcaggagaatcacttgaacctaggaggcgcaggttgcagtgagccaagattgtaccactgcactccagcctgggcgacaagagcaaaactccatctaaaggaaggaaggaagagaggggggaggaagggaggagaggaaggaaagaaggagggagggagaaaagaaaggaaggagggagggagggagggaaggaaggaaggaaggaaggaaggaaggaaggaaggaaggaaggaagggattgattgattcacacgcaggatgtttgttgggcaaatgaaggtttatggtggtccctattggcaagttgtgtttttctagcctcattctattagaaacaaaggctatctgccaccaacatgtttaaacaaagtagcattcctcatatataaagagttgttagaaatcaataaaaataaagcaacatgtgcaaagaacgtgcatacactttggacacacaaaagacataggtgggaaattgtaaaagacttgaaaaaagaatttcactgctgggcacggtggctcatgcctgtaatcccagcactttgggaggctgagacgggtggatcacctgaggtcgggagttcgagaccaacctgaccaatatggagaaaccctgtctctactaaaaatacaaaattagccgggcatggtggcgcatgcctgtaatcccacctactcgggaggctgaggcaagagaagtgcttgaacctgggaggtggaggttgcggtgagccgagattgtgccattgcactccagcctgggcaacaagagtgaactccgtctcaaaaaaaaaaaaagaatttcaccactctaatatttgacaaaaagatccaataatagtttttgtgaaggtacaaggcagtgagcacttgcatacattgctgggataagttagtaccaagtcccatctttctggagggcgaaatggcaaagtatattgaaagtctttgatggaaaataaccataatgactcacatttgttgagtgacaacctcatttattatcttttccccatcagaacagaaactccccaacggctattttgtctgttctattcaccgctgagttcccaatgtctgaaacaactcatgcccctgatttttatacccagcatgatcccgtctactcagttttctgaagtttgagaaccgctgagctgagctaaaaggaaagtttttatgcagacagacgtccaagcatccaatctatttaggcctttttgacaaccctcaagttcttagcagtgagtgaagaattctcaggggctccccactgacccataggttaatagatgtgcttgtagttattagaattaaatgaggtgatttttccttttttttttttttctttgagggaaggtctggctctgtgtcacccaggctggagcagagcggcgtgatctcagctcactgcaacctccgcctcctgggctcaagtgatcctcccacctcagcctcccgagtagctgggactataggtgcacaccatcccgcgtggctaattattgtattattattattattgttgttattgttattattattataattattattttgtagagacagggttttgccatgttgcccagactggtctcgaactcctgggctcaaaactaatctgcccaccttggcctctcaaagtgctgggattccaggcgtgagccatcacacccagcctgagataatttatcacattgagtctttagcatgctccaggagtgttcaaggttttataaacctcaactcacctcatagcaatgctatgagatagatgctaatatcaagcccattttttttaacacaaacaatcccatagtatttattgccatcttgtagtaacacaacggtaatcaaaacaatatgaataaatcttcacattggacaaaggacatctaaaaacaaactgtatccttctcaacaatttctcacttcattgatcatttctagttggagacactttgcagcagagtaatattacctccttttagcatgatccgacccagttgttttcttgactttgttttagaatgaatctcttctgcatcatctaatacaaggttcatatactcatcaaaaccaatgatacagccttctatccgcatattcacttgctcatagagccacacctgaatccgcgatctattttgtaagtatctgaagatgaggctgatgggctgcaccataaccttctgcactttctggccctggccacggtacgccatggtggaatttcacccattttttttttttttttataatttattttgttttgttttgttttttgagacagagtctcactctgttgcccaggctggagtgcagtggcgcgatctcggctcgctgcaggctccgcctcccgggttcaggccattctcctgcctcagccccccaagtagctgggactacaggcgcccgccaccacgcccagctatttttttttagcagagacggggtttcaccatgttagccaggatggtctcaatctcctgacctcgtgatctgcctgccttggcctcccagagtgctgagattacaggcgtgagctaccg[311 bp omitted]actgaatgcatagcatgaaggcagtacccgagccaaggcctggcacatagtaggtgcttagtttgagcaggatctaaatctcgtttggtcagacccacagacacacagctccatgaacagtcgctcctgtctctccaggggaccccaggaagcacttcataaatatttcagttcttgaattctttggtgactctatacagagccgccaggaaaggtgagcaggggcgggagaggcagctttccaaggggggcggagacatgaggcacacatcaagtcactcgccagcccggatacaccaaaatgtacacagcatgaggagaagtcagtcacacagagacacagacacacccaaggcaaatacagccatgatatgtagcaagagaaaaatgagacacgtagtcacatgcgcagagacacatgccccccagagcaaacacagacacacacggacacacgccccatgacaaacacagatgcacacagagagacacacggccttaagcctcacacacggagattcaccagatccacaccccaagacagaagcaggcacgtccactcctgagaccaatacaaactcactctaagagaagcacagacacaaccagggccttcgcctaccgggggccgggttgggaggctctggagaccctcgacccttgaggaagcccccattccagcctccacctgcgcctccagggcctcccacaaaggtggtgttgggcccgtgggggaaacgctgggcgggcagagagatgggggcttccgcggcaggaggggcccaaccgggtcggctgcgttgcagagcgtggctcttgggcgccacctagtgggcacatggagtagagggcccggctgccccaagtgcagatccacatctgtgcaggtcctgggttcatctgtttctgcttttgtctatttgcgtccctgtgtgtgtgcgtctgtttcactctgtgtctcagtctctgtctctcttctccctgaatctctctttttctgtgtctcggtgtctttatctctccatccctcttttttctccccttccctcccccacggcttcccccacctccagagcctgaggcttcgtcaataagcaagccaggcatctccagtgacccagcacaccccacttatagccgcatctcttgggtcccgtccctcaacggcgtcttggtccccatgagtgtccacctgctatgactcagccaggggctgagtgagtgggggtgtgatacccaacggactctcactctgtcgcccaggctggagtgcagtggtgcaacatcagctcactgcaacctccacctcccaggttcaagagattctcctgcctcagcctcccgagtagctgggattacaggcatgcgccaccatgccctgctaatttttgtatttctagtagagacaaggttttgccatgttgaccaggctgatctcgaactcctgacctcaggtgatccacccacctcagcctcccaaagtgctgggattacagacatgagccaccgtgcctggctaattatatctattttttaatacagagtctcgctctgttgcccagactggagtgcagtggtgtgatctcagctcactgtaacttccacctcccagattcaagtgattctcctgcctcagcctcccgagtagctgggattacaggcgtgcaccaccacacctggctaatttttgtgtttttagtagagatggagtttcaccatgttgaccaggctggtctcaagtgatctgcctgcctcggcctcccaaagtgcttggagtacaggtgtgaggcaccatgcccagctgtgcccaccagttctgccagcctgcttgctcctatgttctggtctttggagcagggatcccaaaactggaggcggcttgtggccccccctgctgtgtctttgtccaaacagagccagggccctgagtccagtgtggctcgcccctccttccccagggctggctggttctagcttcctggaggtgaaagtggtcatggcatggggagaccggggacacggggacagtgaggatttggatctcaagcaaggaaaggcctgaagagagacatttgagtgttaccctcaaacccttcgaggagggctggctctcttcttctcaagaagaagaaaccctacaggctggtggtcccatccctgatcagccactgcggccccaggtccccatgttcctgcctgctctgttgctcaaaggtgctaggccaggtgcatggctcatgcctggagtcccagctgctcaggaggctggggcatgaggattacttccaggagctcaaggttgcagtgagctatgatcgcgccgttgtactccagcctgggcaacagagcaagatcccatcgctccgaaaaacaaaaaaaagggtgggaggcgtgtcctttccttcctgggggcttctgcacaccctgtttcttcttctggaaagcccttctggggctccttcactcctcatggcttaggtctgtccagtcccctcctccaagaagccagtctcattccacccccagacaacaggaacctgcaggcttgtctcagtcatggctgcatctctgccatggagccctgctcgcagtaagtacccaagaagcatttgctaagctaaataagcaagaaaacaaaggactcagagcccagctcttgagcctggatttcatcttgacttgcttggcagggggccttggccaagtgggtttccttcctgctctgtgcactgtttccccagcaatggggacctttcccggaccacctgtgagatccaccctgctgggtttcatttcagctgagtctgtaaatatttggtctgctgtggccggcagcatacacgcaggggaagcttcagtgccttttacgagctccccgcgaggcctgatatgcgttttctgtggctgggtacacggggcaccccagtagtttcacagctcgttggcacgaggtggctatgattccaagactggaagaagccgagagacaccatcagtggcttccagcacttaactccacagcgtgcagcatttgagaggccaaagaggggcctcttgttttaaaaactgtaatgcaacattatagattacagctgcagtagaaatcgagcccagcgattccccttccctaagtctatgggccacacttaatttcttaaagggcagaggggagggatttctgttgggcaaggagtgggaagccctggtttagacctgtctcttgctaaaaaaattcaaagaaccacaaccacttgctatgcacctactgtatgccagatattgcataaagcacttttttatttttttgagatggagtctcattctgtctcccaggctggagtgcagtggtgcgatcttgactcactgcaacctccgcctcccaggttcaagcgattctcctgcctcagcctccttagtagctgggattacaggcatgcgccaccatgcccagctaattttcatatttttagtagagatggggtttcaccatgttggccaggctggtctcgaactcctgacctcaggtgatctgcccacctcaccctcccaaagtgcggggactactggcgtgagctaccgtgcccggccaaaacctgctttttttttttttttttatggagtctcgctctgtcacacaggctggagtgcagtggtgcgacctcagctcactgcaccctccatctctgtgttcaggcgattctcctgtctcagtctcctgagtagctgggactacaggtgcctaccaccacacccggctaatttttgtgtttttagtacagacggggtttcaccatgttggccaggctggtctcaaactcctgagctcaggtgatccacccgcctcaccctcccaaagtgctgggattacaggcatgagccaccgcgcccggccaaaacctgtattttaaaaggctgtgcactggggagatgcagatgcctgccccaacgatgcttatgtggtggagagtgccgacaataaacaatgctttagcgagtggtcagagccacgaggacaggcaggtgtgacaaggcagagggtgatgaggcgctgctgatccagtggtcagaggagacctcttgcagggggcagaatttgaaggggctgggcatgtgtggctggtctcctcagtcacagccagtgccacgctgttcttttttgagacagccctgtcgcccaggctggagtgcagtggtgtgatcacagctcactgcagcctctgcctcctgagcccaagtgatcctccctcctcagcctcgtgggtagctgggactacaggtgtacaccagcagcccagccaattttatttttttgtacagatggggtcttgctacattacccacactgctctcaaactcctgggctccagtgatcctcccacctcagcctcccaaagtgctgggattacaggcatgagccaccgggccctggttcacagaccacccaggaagctctcccaggagggcaatgtctcgggtcctcagtaccttatgctccactgaacccggcagctgctgtgtcaatatttgcaggtggaggcaaacacagggcagctgcatctcacgaggatttgaggagtacggagaagcggctcttggtgctcccgggagtaatttaggggcagtttctggcccagtattgctgtctctggaagcactgtaggacatgtagagttatccttggggtcaactctaaaggccaagcgcatgtgcaaaattatgtacacactcacgtacgcagcttgctcactggtgccccaaacacctatcccttcaccaccgtgtgaccgcggcacggggtgccctgacaaccggggaggctgaggagaagggacctcgggctgcagcctcagctccatggctcgctacctctgggcgggtctcagcctccctcgggctcagaaccttcttctgcgcttgactttcccaggaattgactccagtttcccagggagctgcactgggctatgtctgggtttggtgatgttgtgtggcgtccgtaggtgtcctcatataaattggtggctggccagggggactagagatgtctaacttgcttgactggtaagcacatcaggtgcttcccaaagtggattctgttgtacaccagggtgacggacaaggatgcccacgtcctaatccctgggacctatgaacacattggtctccaagacaaagggaccttgcagatgtgattaaggtgaaggaattcgtggctgggtgtggtggctcatgcctgtcatcccagcactttgggaagccaaggcaggagaatcacccgaggccacgagtttgagaccagcttggccaacatggggaaaccccatctctactaaaaatacaaaaactagccaggcatggtggcaggtacctgtaatcccagctacttgggaggctgaagcaggagaatcgcttgaacccgggaagcggaggttgcagtgagccaagattgtgccactgcactccagcctgggcaacacggcacggcttcatctcaaaaaacaaagagaaaagctctcctagtccacccagctgaccaaagaaatggctgaagggctgaggtctgaacccacccagcagtgagagcagaatccgaaccctgatttgtcaccatcgtatgaccaggtaggaacagcctcacctctcccgtgggtcactgggactcaaggaagccctgcccctcaatccggcaaacctgttaaaaggcacggcatccccgttaaacgtcgactttatggttgttgggtttttttggaatcaaaaggccctgttctaactttgcctttgaaattatgtgactaggagtcatgcatgcaatttgagactggcaatcatcgtggaggcttgggagttccttgggaataagaaaatctaacctaggagctgttttgaaatgtaatgaaatctttatgaatacaaaatttagcaattggtgaagttgacacattttgtagctgtggagacatttcgtaaggtcttaattctactttttctttcttttttttttttttttgagatggagtttcgctctttcacccgggactagagtgaagtggcgcgatctcggctcactgcaacctccgccccccagggttcaagaagtctcctgcctcagcctctcgagtagctgggattacaggcacccaccaccatgcctggctaatatttgtatttttagtagaaatgggggtttccccatgttggccaggctggtctcgaactcctgaccacaggtgacctacccgcctcagcctccagaagtgctgggattcgaggcatgagccaccgcgccaggccataaggtcttaattctgattctgctgttttctttctgtatggctggagctggtcatttcctcaccgggaccccctccagacctctggcattgcatttcgccagggcccctgtgaaacatgagcacccgaggctctattcctgtagggctccccagggcctgccaacatgtattaagcatttactgtatgccaagctttttatgtggattaactaatctttgtaaagatcccatatggcaactacaatgattactccctccttccagttaaagcagctaaagcagacagtaatgacctgcccgtgggcaggcaggtagtgagaaggctgggtgccaggcagttggctcctaaacttgctctcaagaagctccctgtttctgccccagtggctctcattcccgtgatgcccccacagctccccctcccctttaaaaatgtctttaaaacgatgggaaatgatacataacaaaattcaccaccaaatggtataccaaggccaggcatggtggctcatgcctgtagacctagcaacttgggaggccaaggtgggaggatggcttgagctctggagttcgaggctgcagtgagctatgatcgcgccactgcattccagcctgggagacacagcgagaccctgtctcgtaaaaaaggggaattggaatcttcatatagtgctagtaggaatgtataatggtaccaccactgtggaaaagtctggctatacttccagaaataaaacacagggagttacaaagtcagcataggacccagcaatcccagtcccaggtatatacacaggagaatggaaaacaggtgttcaaacacatacatatccataaatgctcacggcagcgtgattcacacacaactgcccaaaggggggaaccacccacacgtccatcagcatctccttttcataacacgtattttgttccacccaccttttctctcttgaaataaaagt[144 bp omitted]tggaaccccgtctctactaaaaatacaaaaattagctgggcgtggtggcaggcacctgtaatcccagctacttgggaggctgaggcaggagaatcgtttgaacctgggaagcggaggctgcagtgagcccagatcctcgccactgcactccagcagtgacagagtgagactgtctccaaaaaaaaaaaaaaaaaaaaaggaggggggggggaaccaggacacaaacacgcttgcaggaagaaggccacatgatgaggatggaggccgagactgggcaatgtttttacaaaccaaggaatgcccagaggtgctcggcagctgtcagaagccaggaggctcaggacggagcctgggaaggacacagccctgcccacacccagatctcagactcctggcctcaagaactgagagccaatgagcttccttaggcagtctatggtgctttgtgacagccgtcctggtaactcgagtgctttgtttctgcgtggaacagagctggttccaggcccggctcgttggaaagggcagggctcttctgcccccataggatgtccagtgggactggttccctttccagctcccatagagcagcctggcagtggttgagcccctgcttcatagttcaggaggccacacccacctccaggaaggggtgctccgtgacatctgagacaccgaggtctgaaaacagggcctgctcccaatcccaggctgcctcctcaacgcaggctaagcctgccttttattgcccaacagggaagctctcaaccccaatttctagactctggctcgtcggggagacaggcaagccgcgaagaccccatgtgcaacacagaggcggcgtggcgcccagtccacctgccactggaaaatgactccagaagccgccaccgtgggggaggctccggaatgcgttcacggcagctcaggcccagacaggacgccgagggccagggccaacctgcctttcatgctctggtgtctgtggcaagctgggctggattttaacatggctttttaaaaacttaacttcccagcgggggcggggggaactccagcagaaccggcagttggaggaggggcctgcgggtggctgtcctagatacggaggggaggaaaagaggtccccagcaggtggccctgccagttaactctcaccacaccacaccgggctgggctgcccctcccgccgagagggcactaggccaaccccatgcaccatcctctgccccaagatgcctgcagcccctacccctggccagcaccagctccgctcatgcaccagcagttctgaacagaacagctgtgcctcacagtggccggcccctggagggccctggcacggagggctgcgcgcatgggccggcagcctgcgggctaccccggccagcgaagtgcctcatctggcacagtctttaaggaagaaaatgggcatcacactcaaatgcacttttgcagacaaatggacatttccagaagaacggagggaccagttctaccacgtgggcccatcaccgagtcagcgccatcccactcctaaccagctgctggcagcagacactgagcaggacacacttggcagccaggggaggggcgggcccaccacacacggaccctccctgacagagcccaccacacaccagcatgggacacagccccagactgaggtggcagggggagggctccccagggcctggcacgccctcaccactacccacgcagagacaggctcggggtaaagggattggtctgagggccctatggtgcacagcaccccctgaagaattcctagttcccatgggctgactccccagcctcagtttcatcccatgatgggaacccggacagcccacttcctgaggtggttatgacaactcagcaggatgatgcaggcaaaagactttggcagcacctggcagagccaacagtcaccatgtggtcacaccactgcgcccagggttggtcccatcccgagctctacggccaccaggactcacgcatgtgcacgcgcacgcaagactgcgaatggtaaactttattaatggaaaatggaatgcctcgttaacagaaaccttgatttaaaaatggcagaacaagaacacatttatttaaaaaaaaaaaaaaagtgagttcacattgtattgagctacaacatggtggcaggatttactttgcttttaaaaagatcccccaagttcgagggaaccctggctaccagattcaacagtgcgtctgcccacccgaaaactcgcagcgagtgggacttagtagcggcgggtgaagtgggggtacggggggggatgagggtgtgggtgagggactctgctgccccggtcctggctggccactccgccaccttccagtccgccacctggcaccacgtggccctgggaatgtccaccttgtgcaaagccgcctcgcctaggaacaaagtcagacaatttttttccccttgaagtgctcagcgttttcatcgtaacatgggttcagtaacggtcccgcagcctttagagcgcttgggttttttttccaggtgagaaaaatcatcatcgcacattgtattccaggtaactcaagagcgttatttgcataaattgcaaagagctgctttttgctttgttttcataacatccaacccagccagctgatcaaacatgcaaaaaagggagaggaagtgaggagcaggagtgaaccaccgtcctccacggacgacacaccttaccccgccactccaccgcggcttgccatgtgccccggccccgagggcccagacaggcccctctcgccacctagaagagaagaagggtctgcaaacactccgttcctggggaagcccctggacacatgtgggggccacagccaccctcgtccctggagccagccccgtaccttgccacctggcgtgctcccggctagccgcgcctgcgtccatggcaccctgccaggcgcgtgcctggtgctcctctagccgctggttgtgctctccccagtcacggccacccctttgccaaaagaaaaagacatgcagccatctaatgagcctccagggttgtgtcggcagcaggcgcacccaccctgacctcagctgcatggtgggtcatgccacacaacaagggctgcatgtcaagtgggcaaatcaagggaagggacatttccccaaagacagatgtgctagtaagcacgtgagaaggtgctcaacgccacccagaaatgccaatccgagccacaccgagatgctacctccccctggctgggatgctagaatcacacaataacacacaccgtggagggtgcgaggaaagggaagaacccttgtccactgctggtggaaatgtaaaatggtgtggccactgtggaaaagtttggtggttcttcaaaaagttaagcgcagaattaccatgacccagcaaacccattcctacctgccagaaatgaaaacatggccaaagacatctgtgcatgaatgttcctagcggcaggattcctaacagccaaagggagaaggaccccaacacccatgaactgatgagcagataacactatgtagtgtgtctggaccatggaatgttcagccctaactaggaaggaagcgctggcccaggcagcatgtggagatgagccctgaatacccaaggcttagggagaagccaggcccagcaggcacaccgcgcaggccaagaaatgactcaagacggcaaatccagagccagaaagggacctgtggctaccaagggcaggggggagggtgcagctgctaaaaggggcagggtttcttttgacgtgatgaaaatgcttcagaatcagccgtggggatggctaaacagatccacgtacacgcaaacctccactgactgcacacgtgaaacgggaagtgtgtgtcgtgtgaactatacttaaagaaagctatttgtttaaagtttcagacaaactctgggagatgaaaatccgagtccagtgtcctgagtcccaagtggccaagcagtcacagtggccgtgcaggaaagcagccagacccatctgcacgagtgcctgcctgctgtgggttgccggatgcagtgacagtcaggccaagtgagccagcccacaggcccgagaggggccaccagagcccccagcgcgcactgccaggcaagtgcaataccgccctggagggagcggaaagctcccgtgtggaacctgccctcggtgacccgatggcgcccagccgctgctcaccatgggtgagtttcccgtttacactcccgaggtatttaccataacacccagcaagcgacaggacaggaatgctaatgaagtctcacaggagagaacacttcacaccaactgatcagagcactgccaccgtctgtgctgcccagagattcaggagaagcttcgggtgtcctgggacactcggcacagcaccgagtcaaagtccctggcagagctggaagtgcctctcagcgcggagggagggatggaacgggggagcacagggggccaaaacccaccctgtggcgctgggcagggtccgaggcagccctgggccagggctggagacaagacaggacactcggctcacagaggaaagcagggcagcagccgcaaagcagtcctgccaccagcctcctcacggccagcccagacggcaacaggacaaacaggcaggggtgactgcagctggccaaagaaactagagaggcacccagagtcctcccagacaagccctgccccccaccaatgctgacaaggctcagaacagcacccccactgcagtgctggtgaaggtggctttggacacctgtggaggacctggcccagtgtcctcagccctgagtcctgggtggagggtcctcctaagtgattctaataggcaggatagggttgagaagatccaccccagaccaactgggggtcagagaaaaaacccgaggaagacacgtgtcaagaggcaacgtggaggcaggggcgaggctgctctaccacggacggggcaggactaagagcttcagcgctgtctctcccagtgtgtacgcagcccatgatcgagacattcacaactgcaggcgacccccagctcaagaatggggatgggccattctgggcgacctggacagctccatccctgaaagcctgttctatgctttcttcttgagaacctggactttctgagtcaggggtttcaaatggcaggacccctggtagcccatcctaaagctcccctagctgaatcaaaccttggggacgtgcctggccaggcaccaaccttttcccaggttaggacagatgctccccacccggctggggctcacccactaacctggggggagggggcagcccccggccttcactcagcctcttgtcggagccgtagcccccccagccatcacgggagtcccggccgtggcgctctgggggtcctccgtggccatggcggtcatctccatagtgctggaaggcaggagaggaacagggtgacactgaccatgtcacccacataggcccaccttccggaaggcctgtccactgcaggccccagggtggcaggtggggcggagctgagagaggactgaagggtgcagtctcagccctgctgggccctgcttcactgaccctctgctccctggctcccctcctcgcacccctacagctgcatcactgccccacctgagctgccccaggagccagggcaccctggcattactgccctcaacagctctgctcaagatccactaagacgtcaccaaaccctgtcttccctgagaagttgggcgccgcctcctttccgataacaggagggccctcgggtgggtcagcccccctgtgctctggcagggccacaattccggcctccctggccaaccaactctgcacggagcagccagcagccaggaagcaggcgggtgctgcctgctgttacaggccattactctgccgcccacctcccacctctccaccaggctgctgctttctcagaactcacaccctgccaccacgcacggggcacccgcatggcaccacagagactcagggaccattcttgtggtcttcagccccccgtgcccaccaagcacggacttgaaacatggggaagcccgggctcccccatccccccgaccctggcacatgtgggctaaacgacaaccaccatttgggttcttgggggaccccacaggcactaagacccaaaggctccctgagcaagtggacaatgaagagacacatgaggtttctaccggatacaatgaagaacaagcccaacatatttgaaaatgacagaaacttgagcattacaaaacaatcaaatatttgcgctttttttttttttttttttttttgagacggagtcttgctcttgttgcccaggctggagtgcaatggtgcgacctcgactcactgcaacctccgcctcccgggttcaagcgattctcctgcctcagcctcccgagtagctgggactacaggcactcgccaccatgcctggctaattttttgtatttttagtagagacagggtttcaccatgtcggccaggctggtcttgaactcctgaccttgtgatccacccacctcagcttcccaaagtgctgggattacaggcatgagccaccacgtccgactaaatatttgtacttctagtcgctggccagaacccacacttgcatacccgccacacgtgctgacttggttgccacctctctgggatcaagcggccgcctggctagaaatggtccgctatgcctgcacagcagtacagtggccccagggcttggcatcggggctctactcacctgcccatcccggtggtctcccatcattggcctcgaaccctcccgcctgcaaaaggaaaagatcccgttcaaacagcaccaggcacgactacacatttctgcaggtcaggcaagtttcgcgactgggatactttttccatcccatcacataaaaactataactggcctgggaaaaaaggaaaaagctagctcaaatcgaaaggcttttccccgggggcagaaacgaagttggatcctaaagaggtaggaataaagatctcactgaactaaaattcctcggggagctctcagttaggggaacagggacaaacagaggcctccaatgatccctcatctttggtctgacccaatgcgtgggactcatcaaaattcacaccaactccaccccaaactccagcagaattaagagtgtggcctctcagcctccctttcctgttctccccgctctgacattccgactgaaggagccaatgaatggggaaatgggtcagagatgtgcagccgaggggagcccaaagacaggattcttacactggaaaaccaagggctgcctttttaataaactagatgtattcctcattttaaaaggctaaaaaacccacccagaccctcgaaatacaaaacaggcctcatgagaaattttgcacgtcctccatcaattctctggtagctcttgggcacaaccaggttgtgctgacaaacactgctgcctcacaagagagctcagtgtagatggcctgcactcaggcccctcctggcccacctatgaaaagagtcggtggatggaatgagctctgagatgccttcctctgaggtaagctggggattccagcaactcgctcaagttctgtgcaaggccagagtcatccactgtggatctcagaagtaaacgaggcttcagagcacacaggaacccctgcactgggctgagaacgaggtcagctggatgccccggtgcccacaatgactgtagctaaaggaggggacaagaccactgacctgtcgatggcgtggtcctggtactggccccggtctcgatgatcgaagtcgtgaaagcggtggtctggccggggaaagtctgcacgatatcggtcctccattgccacacgctttccttctggccaataggcatcatctcgtctgttggtttttattttaaaagaatacaaattccattaatgagagaggaggaggaaaaaaggaggaggtggaggtggggaggggagctctctccccagacccagtatcgtttaaaatgtcctgcagggctaatctctaaacattcgatcatcattgctttgatctgataaattaaaaccgccattaacagccgagaggcacacttgtgttctcatccaacagtcccaaaaggagcactgctgtgagctcattgtctcgtgaggctgttattaccttgatcccccctcatgagcaactgaaaagaaatatttgattcttctggaatagcattcgagttgccacacttttactttccctgccttccacgggagcctgaatctccctctgagtttcttgcaaaagcaaagagaattagatggggtgatagtgaactacacacagctctggacggcatccaattatcttcttcctgatttttaccagaaaactaggctcacggagagcggggtgaagggtgactgtcaattaagccgcctggggtagctagagaccaataaacctactttctaaatcagaggcaatttccttttccacagcgcctgctctgcctctctgtctacaaggacacatgagaccggcagagtcagcggtggccaacttgggcctaacgggcgttcggttgtctcgcaagacagagaacagctatgctccacgggtaagtggagaggaaaagcatcacaaacccttcagcaagtggcagccatcaagtttcccagaataactcaagttcaggaagatgctacacagcctccggtgaggacagcgaactaataaacctgcagcagcgcagtgagatcggcggggggtccccaaggcgcatgctccatatcaaatttcattctccccaccgacagggacggaagggaagccgctgttctgctggaagggtgaacaccgctgccacgctggtctccgtcctgcccacgctctgggcgggactcaccggtccaggtcgtagggcctccgcccgggccgccgctcctgctcgtaacgcagctgctcctgctggcgccgcagctcctcgcgctcgcggtggatgcgctcctgctccttcctgcgctcacgctccacgcgcatgcgctcgcgctccagccgctcccgctccatgcgctcccgctccagccgctggcgctggcactcgagctgcaggcgttcccgctgtagccgggccttctccttccgctcatggaaggcctcgaggcgttgctcccgctcccgctgctcgcgctccctgcggggacaggtgaggctgccctgaactccctgcgtgagcctccaaggagaaagcccggtgcccaaaactgggtgtgtattggaagcagaaaaaaaaaatggatccaaaagctcaccgggcttccctaaagctgcgcgtgcagggggttaccttacttaacaaagctaccttaagaaaagcaaaggcagcacagctggcaacatttctaggtttgctcgagaacattttccaaatgctgtgagcacagcttttgctttactgagcaatatttgaggaaaagtgacaagagaacgccgggcatcccgacatgaaaaggccgaatgtcaaggcagagggacaagcctccttcaagaccacagcccagaagggagccgcggcaaaatgacaactggactctgcttgcagtttctgaccttaggtgaaaggtttcaacagggaagacaggcctcagcacccaggcaccatcccatcccatcaaagccacacacggctgggccttccacacgggccaaggtccaacatcagaggaggggcgaaaatagactttgagccagcagaaggctcagcctgtaatccagcacttagggaggctgacgcaggaggatcgcttgggcccagcagttatcagcctggcaacatagccaaaccccatatactgtaaagggctttgatgacttctttttaagagacagggtctcactctgtcacccagtctgcagtgcactgttgtgatcacagctcactgcagccttgagcttctgggctccagcaatcctcccacctcaacctcctgagtagctgggactacaagtgcacgccaccatgcccagctaatttttaaatattttgtagaggtggggtctcgctacattgcctaggatggtcttgaactcctggcttcaggggatcctctggccctggcatcccaaagtgctcggattacaggtgtgagccactgcacctggccctttgatgactttcatgccacctggcatgtctggcggctcacgtgtgaacaggtgctggcccctgcctcgaggacccaggttaagcacgacacccgccagcccaggcactggctctcgggcacacagactgcgcactccaagtacagctgggagaaggacagccaccccgagaggaaaccaccagcccacagcctcacccagctccactcaccgccgcctctccgtttcgcggatctcccgttcccgctgcctctggcgctctctctccctttgttctttgattttatcaaacgacaagatgtctctcttttctttgctttctgacttgcgatcctgactcttggagctctgtttaccaaaactggtttattaatgtcaggaaaatgattgcaacaaacaaacaatggagattatgcacgtgtgcatgagactaagattctctggccccacatggtgtagatggaaggctgtggtctccagaccagaggcccaggcataggctgcttccctccaagtttgcattttactgcctaatccagaatcctgctttcagatgtcaaggggcattcatggaagagaagaggttggcccacgcctcagaaaacctacaggcacagttcttctagcatagcacagccaaggactcacataatccaaagcaaacctaggcctctcagagccacgggcacatccgcacagggccactgtggccattagttcagaggggacagcagtcaggccagctgtttggacagctggagggcagactacatgtttcacatctcaactgctggctcaggactcaggcagacagctctaaatagaatatgccaggccgggcgcagtggctcacacctgtaatcccagcatttcaggaggccaaggtgggcggatcacaacatcaggagttcgagaccagcctgaccaacatggtgaaaccccgtctcaactaaaaatacaaaaattagctaggcgtggtggcgcatgcctgtaatcccagctacttaagaggctgaagcagaagaatcgcttgaacctgggaagcagaggtggcagtgagctgagattgcgccactgtactccagcctgggtgacagagcgggactccgtctcaaataaataaagagaatatgccaaaatgctttaatgcaaaacagtgctcctaataaggtacagaacactaatagccaacttccgtaatttattttttgtaggttttttgggtttgagacccagtcttgttctgttgtccagcctggagtacagtggctcagtcacagctcactgcaggatcaagtgatcctcccacctcagcctcctcagtagctgagaccacaggtgcacaccaccatgcctgactaatttttctatttttgtagagacagggtttcgccctattgtccaggctggtctcaaactcctgagctcaagtgatctgctgcttcatcctcccaaagtgccgggattacaggtgtgagccaccgcacccagcctacattcatcattttctatctgtggcataaagctcagagctgtaacaactgactcccatttccaaggttctccagggcccctcacccaaactggctacacatcagaccctcccaggaagcttttaaacaacacagaacctgaggcctcctgctgatccacacagaatctctggggcaggggcctgggaaatgacatttttaaaaagctactcagtttatttccctaattagcccccataggagagaaagagcgagcaatgaaaaacaaaccaacccaacagaaagacaggcaaaggtcaagatgagacattacaccaattattaataaaatgcaggctggggagaaaggggcacacagacacaggagagacacacatcacccagcactttgatggcaagctttgcctacgagacgggcagatgtcttacacacactgcagtagaataaggtgacagatgcccacataccaccgcacagtgggcagcacagcaggcaacagtgtcagcacgggactcctgggttctcaggccagcttagccacttactagcgacctggcaggtgcaacacacccaggagatttaagtcccctccacaacctttctgaacagcactttatttcaaaatttaaacgttaaaagaggctgggagtggtggcgcacacctctaatccagcaagtttggaagatcaaggcgagagaatcacttgaagccaggctaagcaacaaagtgagacactcccaccctttattttttttaataggtaaatatcatgcataaaataaaaaatatatgtaaaagcgaaaagaaaaaaaagcaaaaaggaaaaaagccaaaccgtatgtgtctgtatgtagagacctccaaggcatattacacagaaagtgcaagctccagcacatcctctgtctgtggtcccatggcaggcacaggggacgtgtgtgcagaggaagccgaggagcccaactggacacacggaggctttagtatgcccgtgctgcatctcctcaagctgaccagatgttctaatcatgcatgtgtcatcactacttgttttcaacatcacagttacatgggggtaagagtatgggtctttttcaatgttctactctacatttctctgtatcttatgattttcatgtgaaaaatgacattaggaactgatactttataaaatccaaatgttcattttaaaaactaagtcttggttgggcacggtggctcaagcctgtaatcccagcactttgggaggctgaggcgggtggatcacttgaggtcaggagttcgagaccagcctggccaacgtggcaaaatcccgtctctactaaaagtaaaaaaattagcctggtgtggtgatgtgtgcctgttgcctgtaatcccagctactcgagaggctgaggcaggagtcgcttgaacccaggaggcagtggttgcagtgagcagagatcacgccactgcactccagcctgagtgacacagcaagactccatctcaaaaaaaaaaaaaaaaaaaagttaagtcttaacaacacaaagtggtcctggctgaatatggtgaactccacattcgttaaaaaagtactgtcacctcatgaatatcttagctagaacctgcagctgggaagcagaggtttttattgtttcccagagtgaaaaacgcaaatgagacgctatttcgtctagttgtgtgcacaactcgagaggtacagctcttgatctgataacatgaccagctctctgtcctaggttggtctctacctttttggttaatttaataggagactaaaaaaccaatggaagaaagtagcctgctattaagtcaaccaaagagtaggacctgccttccggctcgaaaagcctgggtctggcccatcccaccctatggtgagctgccgtgtgaaccaatgctctgtctgaaggcggcacatcccggtcaggagccagtaagggaagcaaacacggatgggcactgctctgcagaaagcaccaggattcatgtgtgtgtctgtatccgcaatctacacaattatcgcgcctcctacaaacttcaattttaaaggcaaaacagtgctgttttcataatgcggatcaaacgggccgtggagccatcgtgagaaacagctggccctgagatggcagaggcaatactcactctctctttggacctgcttgtggttttcacgctaatgacgggctctcctttcgatttatccatcacgaccgtccgctccattcctctgcttccttcaggaaaaaacacaacaaactatcaaaacctgtggacgccccaacttcccgcagtaaacagcactctgatggaccctgggcttttgaacacacaaggcgtgagtcaagtgactgacactagccttgggagcctctaattctcatctattgtgagcaacacggtaacacgggcacagcatcatgggggtaccctcacagctctttacacaactagagggacctgttcccaacctacagcttaaacctgcagcacgcacacaagcacggccatcctgcagagccctccgtgaccctccactctaaacccacacagctccggagctggtctatgctgtcactcctccctgacattctgtgaagctccgcagtatccagcctgtgctaggaatcacactgccactctgagggagtgccttgccagacgggtgggcttccctccattcatctccagcaataaaggcttccaaaccaattatctctcctgacgacagaaccaccaggcataaaccactggaacaatgacttatttggggagatttataatacttgaggaacattttaaaaacacgttcctcgtgagactcagggtaaattagcccgagagctgaagatccagcttgtaatgtgctgtaccaaatttcaatgctccagatggttgggttttgtctctgtttttctcttccttgatgggggaggtggagttggcttatttttttttgccactaaacattctgagtctcatacagattcaaaggtgtaaagcacaatgaacctttataaaatgacaacagaagtggcatcgtccaaacagaaccacttcaacagatgcttggaggtttcatttttctctgtgtttttactacctccagctttaacataatgtgggaaaactttactgcacacctgcaaaatagcatcaggttagttacaagaaactcggacaactcactcttgcaaatcccacactacaatcagccaaaggccctgaaaaagcccaaactcaggcagctgagttcagcaatacacataagccctgagtcccaggcacttctggattcccgatgttgtatggacactcctttaagccatttcatcaacagactcttgtttctttaacactgccatatgaacagcgaaacagccatgtcaccagagcttgctgtcctcaccttccctcggaacccccactccccacccgtgccaggccttccccttccacagctcttaaaaggctctcctcacctgatttggtgactctagaccgatttgtaggtccgggtttcagctcatcctggtctttttcttccttcttaatgtcttcaggctttttttcctccttcttctcaatcttctcttccttcttaattacagttctatttaaagacatggttatcaaatttgagttcacaagactctgtaacaggaacggctcacccagagcctcgactcacacatactcagacgtccacacaaaacaaatcaccccggcagcaattaggtgggaaaaattatttggaacccatagtaataacaatactcctctttagatacaggctgtattcccacttctagtatgtgctgaattgagggatatgcacaatgaaattcctggggatgcgtttccaaaatgtcagacaggctagcacgcaagagtggtgtgcaggtggacatgagaaacacgccaactacataagaacacttctaaaaagtttaatgtttcatcatgtatgtgtggaacattgtttataagctttatagggaaaagcatttcttcccaatacagcctcaacgggatggaggcacagtggcaggacaccaagcccccactgcacagagcggcaggccatttacccgtgaggccaacacccctcgaccggtaactgctgcatacttttagggagttaaaataatgtgttatgtgccagtgaatacgggaaggtgttaagtgccatttcaaccaaaggcaactttcttctaagcagtgaaataaatcatcttcgccactcaaactcagctgctgcgttccctaatgccatttgtctcaggcaattaaactgcacaccgactcaacaccaacgacatgccagggtccaggcaggaaagtcaggcccctgcaaggccctccagcaagcacctgttggcctctcctccaaccgacccaggcagggttcccggcagagctccagccatgccagggaagcctctctgattgccccgtctcctctgcccttctcaacctccacatcatggagttgtctttaaaaaaaatatatatataccattttgagaaaaattttaaatacacaccatagtaattaatggtacatcccagaactgactattgtaaatcatctcatctcctctccctcatccctgcgacaaccaccagggtggccttagtgtcaatcactgggtctgcctgaccgcagtaatctacagtgacattttgtaagaatgtcttaggagtgacacgaacgaggccatacttcatacactgcttacttttgtcacctcatggtatgctttaaagaagggtttttaggctggtcgcggtggctcatgcctgtaatcccagcactttgggagaccaaggtaggcggatcacaaggtcaggagttcgagaccaccctggccaacattgtgaaactccgtctctactaaaaatacaaaaaaatttagccaggcgtggtggcgcatgcctgtaatcccagccactcgggaggctaaggcaggagaattgcttgaacccaggaggtggaggttgcagtcagccgagatggcgccactgcactccagcctggcaacagagagagactccatctcaaaataaataaataaataaataaataaataaataagaaggacctttagatcctgagacagaacttagggggaataaaaagggtctgactcctttcacctgctgcacaaaattctgtgtttattcatctgctttccttccagtagataaatatatatgctggaaaaaagactggaaggatatccaacaaaaagcatcatccctaggtgttgggattacccctgacatttacatgtgctttctgtataacaactgtataaaaaccaccactcatccaagatggcaaaggctagcccctcttcttcccctctttggaaagcttctctatttcacaaggccaaccactaatctagaaatccttcaaatggaagggaaggctaatgaaggtgttaatttgaagaaaaaaataaggtcaaaacaaatttttaaatgctcaacctcctaggcaaacaacctgcatgcagtttggtcttaaagatcttaagttcgccgggcgcgatggctcacacctgtaatcccagcactttgggaggctgaggtgggtggatcacgaggtcaggagatcaagaccatcctggctaacacagtgaaaccccgtctcaactaaaaaatacaaaaaaaattagccgggcgtggtggtaggcgcctatagtcccagctactcgggaggctgaggcaggagaatggcgtgaacccggga[146 bp omitted]cataggttgaatcccagccttgccgtttcccagcaaactcaggcagggcgcgctcccctctctaggcctgtatcctctcctacatagagcaagtgcctcacagggctactacaaggaccaaggaaactgctgcattcccagtgctggccacaggaccacaccatactgttagctaattattaccgcctttcccacaaatacagaaaaacaattaatgaaacacgcaagataccaagaacaccgcaaacctgcaacaacagttccccatcttccaccaatacagacatttttttcttagcaatgctgatgggatgtgtctttttgaagttgctgattaaattagagggctcaccgccccccccacccccctcctccaagttcatgaaggctcatctgacactcattactcaggggcctactgatttcaatctggggccaggtgcagtggctcacacctataatcccagtcttttgtggggccaaggtgggaaaattgcttgaggccagggtggaaaccaacctgagcaaaagagcaagaccctgtctctatcaaaaatttaaaaattacctgggagtggtagcccacacctgtagccccagctactagggaggctgaggtgggaggttcacttgggcttgggaagtcgaggctgtaatgagccatgactgcatcaatgcactccagcctgggtgacccgtctcaaaaagtaaaatgttttttaaaaataataattccaattaaaaataataattccaatttggccatgatgtaaattggtaattacatcttcaaaaacccagttcaactatgtccacagacatgtttaccctctaaactgcgttgacaacgtaaacttaaggcagacactcagccttctgagacactgccatgatcagatacaacacggaaatctaccttctcaaaagagaagcctacaattgtgttaaaaatataaacaacccacacctcccttgaaagatctgtccctacctccattttgattaaagatataaatcacccctttataaaaatagaacctcagacccatggttcccaactactacgccaaggtacgccaaggtaccccaaggtgccaccgtgaactcacagggtgccaccgtgaactcacagggtgccaccgtgagaactcacagggtggcactgtgaactcacagggtgccttggaatatttttaattttgaggtaaacacagcaatgcttttgccatctgtcagacacagcaccaactgctcactcaaggtcattcactgcaacactagaccaggctaaattcctttggatgatgctttatctttgaaaaactgggtgtatgacagttgctgtgattaataagtgagaactgcatgaaaatcaacgtggatgaggaaatgattccaaggtctgagaggctgtacaagggaccagaatatggaaaatgacattttgtgtatactgttttttcaaaaggctaatcagttatcaggaaacaaatacatgctgaggatcaactgtatccacttcttaaagacatgggctacttcgttaaatagctttacacagaaagctgaagactggcagggcgtggtggctcacacctgtaatcctagcactttgagaggccaaggcgggcaaatcatgtgaactcaggagtttgagaccagccttggtaacatggcgaaaccgcgtctctataaaaagtagcctggctgggtggtgtacgcctgcagtagtcccagttacttgggaggctgaagtaggagaatcacttgaacccggaaggtggaggctgcagtgccactgcactccagcctaggcaacagagtgagtccctgtctccaaaaaataaataaataaaagctgaatattaaagtggcagcagaacacaaaaatcagctgagactccagcaggaagctggcaaggctgcgtgggtacaggtggggacagatgcgtgtttttcaaggcccatggtggctgcccgtgccctcctcccagggattccaagaggaggtttgaaaattcactttacttttcaattttgatctccacagaatgatgtctgtcgacactcgataatttttccttcttcacttcgcactcttttctgtcggaaagctttttcccagcaggctcatttttggcctaaaatataatagacagaaatgatgtgtggcccagagcttctcacttgcaaactccatttgcgagttaccatagacgagaactgcctcaccttctctacggagatcattcgtccatgcagctcagttctgtggagatggctgatgcacttggtcgcctcgtcagatgtcgacatggtgacgaatccatagcatcgagcccccgggctgcgggcgttcgttaccactttggccccgacaaccttcatgaaaaagggcactcttactctctcatacaaatgaccacacaacttgctaaagttattacctggcaatcagaatcattttcactatttgtcacctctccccatatggtagttttccattttagttactgaattggttctaattaatcctgacctatccaaatacaattgctttttttttttttgagacagtttcgctctgtcacccaggctggagtgcagtgtcgcgatctcggctcaccgcgacctccgcctcctgggttcaagcaattctcccgcctcagcctccgaagtagctgggattacaggcgcccgccaccacgcctggctaatttttgtgtttttagtagagatggggtttctccatgttggccaggctggtctccaactcctgacctcaagtgatctacccaagtcggcctcccaaagtgctgggattacaggcatgagacaccgcacccagccactaaatacaactgcttttaatacaagataagtcatcacaaggaaaacacacaaacatgcaaggttataaaaccattaaacttcattactcacaactaataaccagaagtcctacccatccacattgttttctctatttccactgtgcccacaaacagctgtggggctactaagaaatgcacccatccactccagctgggcctgagaagagctctgacacagacatggactgtcagaaatgtccccatggggaaaggacttccacttctggctgagatgggagaactaagcattgtcttcctgcctgaaacaactaacaaatgtgatgaaacgtaggcaacgacagttttcagatcctggacatcaggctgcccaagacaacaatccctgagagctccctgactgcccctgctcactgcctagattcccaggcaatgggggatgggtaagacagcactgagattctgagaccaagacagagagaaatcacggaactgagtatcagagaggacacagccacacagagccacgcagagcaagctgaagagacccacagagggttcctcccacccagtgcacacgtgtgcgaggaaaccagaggctgggacagcaccacccataaggagcagagggaacaatcaggagcagagggaacaaccactggaggggcactcagggccacaaatggtttgctcttcccaatagccagggtggaaaggctggtaattcacgggccatcagacccactactcagagggcactgcccagtggtgagacaaaatcagcccaaactgaaggctactttggccctgccttagtgtgtgtccagtacctcagctgtgtcccagaaaaaagctcaagggtatttgtagagatacaagtataactagcacccaaaaaatacaattcacaacatccagtaaaaaattaccaggcacaggctgggcacagtggctcatgcctgtaatcccagcactttgtgaggccaaggcaggtagatcacttgaggccaggtgttcaaaaccagcctgggcaacacagagaaaccacatctgtaccaaaaattttaaaaattagctgggtgtagtggtacatgcctgtggtctcagctactcaggaggctgaggtgagaggatcgcttgagcccgggagctcgaggctgcagtgagcaccactgtactccagcctgggtgacacagtgagatcctgtctctaagggaaaacaaaacaaaacaaaaaaaccagaagaaacttaaaagcagccacagaaaaagagagagaaaagacacaaattggtaactgaaggaacaaagattaaattaacctagaattctatacccagtgaaaatttatttcaaaatgaagacaaagtaaagactttttctgacatgcaaaagaaacaagaacgtatcaccagcaaacctgcactacaggaaacattcaattccttcaggagggaggaagatgatctccgatgggaacttggatatacaacaaaaagcaacgaagagcacctggtgaggtgaacatgattttttcctgtcatttctgggtctctttaaaatataactgtttggctgggcgtggtggctcacgcctgtaatctcagcactttgggaggccgaggtgggaggatcacgaggtcaggagatcaagaccatcctgactaacacagtgaaaccccatctctacttaaaatacaaaaaattagccaggcctggtggcgggcacctgtagttccagctacttgggaggctgaggcaggagaatggcatgaacccaggaggcagagcttgcagtgagccgagatcgcgccactgcactccagcctaggcgacagagcgagactccgtctcaaaaacaaacaaaaacaaaaacaaaaacaaaaaaaaacacaactgttcaaagcaaaaaagccaaaccacaacaagtcaaagccaataaaatattgggtgacttcttaaagagaagtaaaccgtatgacaataacatcacaaagatcgacgggaggggaaatgcaagtatattcccacagagttcttgcactacgctgaaaccaacagagcaccccttgcagacagactgtaagggaagatgtgtactgtaatcctacagtaaaccacaatgacacagagttagagcaaataagccatcagtcataaaaaggactcgacccacaagaaggcagataaatgggaaaaagagatcaataaacaaacatgaacagaaaatagagaacaagacagtagatctaacgccaagcccaccaccactggcgcgcagagtaaacatttccccgggacacaggagtcctggtctctgccctatctctgactcagggcatcaacctaagcaaggcattccccgtctctggacctcatggccccaactgtgaaatgacaaggtggaacccacaagcttgaggttcccatctgacgtccttggttttgaccacacaaatggaggagtcaaggctctgcctgaatctgtccagggccaaagggacagaagactctcctgagagaaacacagatgccacttcccattctaccttcccatcaaattaatcatccttacaagtatatctcttctgatgacagacaaaacccaaatgagagcaggcaccatactaagcttgtatgtccctatccctgagctatgccatccgccctggaggctctgcatacttcagtcaagtagctgagtggtgtcctgcccctctggccttcctacgtccttctgtttttgtccagagctgagccccacaggtaaggccaactctgtcactcacgcctcagctgaatgtcacttcttcagcgagctctgctgaagctgcctcccaaatctaaacacggcctccccaacacactgacggcgtgctctaatattccttaatacgctcatcacaacacatcatatgtgtttatttcttaaatggtctttttcccgccagactaaaaaatctgtgatgacagtgaccacgtatgtttacctctgcttaatcatcagtgtccgagtgaagtcaacaaagtaactgaataaacaggttattcatggctataagaatttcctaagcccttgctgaacacacagactgttcagagaaaaattgaacagcacgctttctccgggtcctgtccgcttcttaagcaatgaaacattaaccaacacctgatcgggtgacacagacctagacaaaggaacggcttctgtagccagaaaactgtgtcagacagggcccactctgcctggaatcagggcaccctccagacactaaatggtccgaaccttgtcccttggaagccactccccagaggcacccaggagaccagggcagtgccaattgcttaccagaagactcttggctaggcgcggtggctcacgcctgtaatcccagcattttgggaggccaagcaggcagatcacataggtcaggagttggagaccagtctggccaacatggcgaaaccccatctctactgaaaatacaaaaattagccaggcatggtggtgggtgcctgtaatcccagctactcgagaagctaaggcacgagaatcacttgaacctgggagggaggcggaggctgcagtgagccaagatcacaccactgcacttcagcctgggcaacagagcgagacgcagtctcaaaaaaaaaaaaaaaaaaaaaaagaacaacaaacaaacaaaaaaagaagactcttaattaatttcaaacagtggaatcattttaaattgtcctcaccttcctttggaaagctgctgaattgtactatttttctcccacccccatgagcagcatcttagtgatttatttttgaaccacgatcatgttctagttatgagactatatacttaaaatgctaaatgatatgaaagtcaattattcacttcattctttttttttttttttttttttatgacatagtctcgctctgttacccaggctggagtgcagtggcacaatcttggctcactgcaacctctgcctcctgggttcaagtgattctcccacctcagcttcccgagtagctgcgactacaggcacagaacaccacggctggctgatttttgtatttttagcagagacagggtttcgccatgttggccaggctggtctccaactcctgactttaggtgatacgcccgcctcggcctcccaaattattcttaagggaaaaatctcatcatgtaagctttaagttttgcacaagacaaaagaccaccagtctctttgagaccagttagaaagaaccccaagaacattgagagagaagctgtttatacagctgttctgagcactgttgtgatatgaccaaccacctgccctgctccgcaccctagttactgtgagtcaggaaacaaggtgcactgcacaagactgggcgagcttcgctgctgtcgttccattttttagtaaacacaacatcttgctatgttgcccaggctggtcttgaactcctgggctcaagcaatcctcctgcctcagcctcccaaactgctgggattatagacgtgaaccaccgtgcccagcagagcttcctttttaactctgaatcacagtggatggtatgaggcaagggaaggcataccttcccatacttgctgaaaaggttcttgagatccgtagcgcgtgttgtggaggacagcccgctgacccacaggttccgaccagaaccgctgccgacccgacctggcacgagagggagattcttaggcatcaccccaaggcctaacaggaagcacaaccattcttaagaccgcagccctctttaaaaaccctaacgacgcccaatcccaactgctgacttaagaatttaacgcacacacacatgccaacacacagaaggctgaaaatctggacagcaaaaactgagtttccttactcaaggaataatcatgcccatgtcagttatgaactgaaatgtcttttgatgatcagatctcatccaagacggcagtctctaaaatccttgaaacagtcttcaatgagcagaattattcctttcttgtaatgtgcttttcaccatcccatagatgacaaccacaagagaaacataaaatgcaggtgcttgcgaacttctaaaactagtctctcaagaaaccattaggtggttgattccggtaacccataacaaaacaaattactgaatccaaagtgtgtatatctccaggcccctcctcccaaaataagggaaccatacctggctccctaccacgttaaattaaatcatacctttttcatctttaatgattggctttatatctttttcttccttaaaagagctagagacaaaagttaatgttactcatacaggaaaaaaacgaaagagaacaaaactaaaaatatgattatgtgctaaaactgaatacctaccagaaaattagtctgaaataaaattttaacagacacctctgcaagcttatattggaaaatctgaccccaaaaatacaatgtcagatttgtaaaagtcaattcgatttagctgaagataacaattaacaatttaagaacacaaccatggtaggttgagaaaaagaaaaggaattgaatcacccattaaaaacacacaaagagaaacgaaacattctttagaagcaaaactacaatttcgtcagtctggctggccaattgcagaaaaaaacagcttatgtgtgtcattacatgaccaatgaaaaggagatagcgtctggtctaaaactgagaaaaaacaaacctcattttctgatcagcgccctcactggttgaggactctttaggagccggagggacttcattacaagcgtcaaaatcaaacttcctcccgtcttctttgctatctctggcttctgggcttggggcttccgtgggtgcttctgcgagctcctcgctagaggcctccgcgagctcggaggccgcactactctgctcaactgccggctctagccctacaggctcacagtccgtcctctcgccatcgcctggctgctccgcgggctcccttttcactaccgctaacaggctgtctgccttgctcgactgagcgtgtgctgttgactcgctggccaaatctaaatcaccctcttccggatgggcgctgtcaaataggtcctcttcctccgcaagctttctgtctggccccacgctacttgtgtcctgtgcaaatggctgctccagctcggaactttcttcttttactggctcagatttacaagtttcccccaaaatgtcgagtattttctcattttctacggatttaacaggaatagaatggcacaaggtttaattaccagggaaataaagcaatcacaaatgtggaactggcacggctgccacactaacacgaagagaactgctagctacacagagattggaaaacccgcgggtacacaaagttatactggttacactacctgcgccgcgaccgcctctaggtaagcctctacgctacacggaagagaaaaggcccccacagatttaaacacctacaaccacgcggctggttctcaatagtcttcttcgagtttttgttcaagtctgggtcttctgactgattttccaatgtccaaggtgctgaaccgaatgcaatcaccattcaatgacagctcaacttccaaatttctttgaatttcttttaacagaacaatccaatatgaaaatcagaatctcttctgacggtgggagataaacgcagtccggaaggggaataatatgttgaaaattttcacggagaaactctgtttcctcttctggaatccagtcacttctcaggtggtaagtgccctgacaacagctttatcctgccttaactgcgttaatcaaaatgactgcagcaaaatatcacaagatctgtttcatgtgtagaaacacatggaggaatcacggggacgggggaattaaatgccactctacgtggttagacatgaaaagaatcactactacattgcaccaaatgtatttgacctcaagaagccagaatggctcttccacagatctggtgatacgaatgggtttccaatctctgatccttgtatgatctggattgtccaccattagagcaatttacaagatcataacacagcttaaaatatagacagctttaaaataatagtgtgaaaactttcaaaccataactgtcgtgtttctcttatcagtacctggctccaaaagggattcttcaatgtcctatttaaaaaagaaaaagcaaatccacaagtcactttaaacacggggcacatacatttcaccagtaaatatggctttcaatcatctgtgaataaatgcctgtttccacaaaactttcttgtctccaaaaaatgtattccatcctacaataacctgatgaaaaccagctcattttaacagtttccctggtaacagcaggtccctagtgataacagtctgtcccattctcccgagtttgggccctgccctgccatgccacccaccccatgaccaagctgacctagtggctgctgcagctggcaaacaccccctttgtcagagaagaggtcacagtggatttaagaaaaaaatacttctcccaacataaactgatttgtaactgaaacctgtcataacaaaatgatctctctactctgctgaaaaccttttccgacatctgtctcacttaggacaataggtccaatccttctggtggcccagactcagcgaggcgggcccagctgctctgcaacacctctggcttctatccaaccctgtgtgctcccctctctcttttgcatcagagacaccacccaaactttctgctccaaattcttctttccctcttcaacctatccgtcagacctctgggaagagttccaggcacttatgaagtccaaccaccagaactgctccctcatcacacttctttctcccttctggttacatatttggtttgatcccactgcccctgctagatggccagccctgagactgtttctcttctgctaacctcttaaccccagcatccagcacagtatccagtcatttccatacacatacacactgctctttcattatggaaaatcaaccactcgattaacatttccagcgatgcagaaccagatggtaacttaccggagttactttgaagttcaacgatgaagtttccaaagtgttcttaaatccttccccatccacctgaaaaacaaaatggaagatgacttcgtggaggctggagctatgaaaaccaaggctgacacctcgcttaggcaacttgtgtgtctatttccctcacggcaccttttgccatctgcaagtctactgttgggtcattcagttcagcacctgcctctccgccagaacacacactccacgactctgctccaccagcgtctctggcagtggcctgcaggtgggtatgccctgtctgtactgggtgaatgaacgaatgaatttcccaggcagtttctaagtactggtgattaccacatacccctccaatcacaggatttccaaagcagaactcaaaatgataaaatgcacccctccaatttcacctggtagcaatactcttaaggtaacactaaccgggcactttctcctagcctactttattcattcattcattcactcattcatttgagacggagtgtcactccttttgcccaggctggagtgcaatggcgccatctcggctcattgcaacctccacctcctgggttcaagcaattctcctgcctcagcctcccgaggagctaggattacaggcatgcaccaccacgcccggctaattttttgtatgttttagtagagacggggtttcaccatgtccaggctggtcttgaactcctgacctcaggtgatccgcccacctcagcctcccggagtgttgggattacaggtgtgagccaccgcgcctggcccgcctagcctactttattaaaaacaaacatctaacttggtcaatttctctctttactacatgccaaacaaaagaaaaactgttaacaccaagttttactaaatctgaagctctttttaagtgaactacaaaaacagcactcccaaatattttcttttttccttttctcgatttgaactcatgacctgggatgcctccattaactgagaagtacacactctgaaaacaataagcacacagcagtaccagactgagaaaggcggctaaccagttgctcagtgctgccctaggtcaaaggatggtaaatttggaggcaatgacttttgaccgtaaggtttaaggttcagtcctatggaggcatttccacccccaagctgaaagctgcaatgccttaaggaaacaaaacaacctactgggcacgtgacatcagtcagagtacaatgaagatcagctcgaagacactgacagcttgtgatatttgaacagcctcaccagagagctctacgccaaaacactagaagtgaaaagctgggaaagccctaacagagcaaagttcctcctttacatacaaggatgctcacagtcagtccttttggggagcagggttgatacttgtcttcactgtactttacatcttttaatgtaactgcttaaccttgcttaaaacaacattaacaggctaggcgtggtgactcaccactataatcccagcactttgggaggccgaggcaggcagatcacttgaggtcaggagttcgagaccagctcagccaacatgatgaaaccctatctctaccaaaaatataaaaaattagtcaagtggctgggcgcagtggctcaagcctgtaatcccagcactttgggaggccaaggcgggcagatcacgacgtcaggagatggagaccatcatggccaacatggtgaaaccccatctctactaaaaatataaaaaaatcagctgggcgtggtggcgcatgcctctggtcccagctcctcaggaggctgaggcaggagaattgcttgaatcagggaggcggaggttgcagtgagccataatcttgccactgcactccagcctgggtgactgagagagactctgtctcaaaaacaaacaaacaaacaaaacacaacattaggaggaatatctacatgatgagattagaaaccatttttgagctgggcacggtggaccacacctataatcccagcactctgggaggctgaggcgggaggattgcttgagctcaggggttcaagatcaacctgggtaacctagtgagatcccgcctctaaaaaaaaaaaaatttttttttaattagctgggcgtggtggttcactgtgtagtctcagttatgcagggggattgcttgaacctgggaggctgaggctgcagtgaattatgatgaccccactgcactccagcctgcacaacagagcaagaccctgtctctaaataaataaaccatctttgcttcttaaaactgtattttaaaaggaaaaaactaaatgggcactgtggcctgtgccaataagcccaggtagtcaggaggatcgctggagcccaagagttcaagaccggcctgggtaacagttgagacctcatctcagaaaagaaaaatcttttatgtcagagctttctattttatgactcaccacatgcttcgaattataaaaacactccccagtgctacagaaaagctatctatgagtaaatccctgagctacacagcgtttaaatggacatggtttaacaccagggtgtagaagcagaactgtgtgttcatggcggtttagctgtgttctccctcacacgagcagcacgcgagcaccaggtgcctcggggctatgggcacatcctgccgtgtctccaagttacctacagcatgctctgggggctgagccgggagctgtctcagctgtgcagccacgtattctttactatcacaaaaggaatcgagaaggccgtccgtgccatcctccccaaaatctggagcactgctattcgccacttcagtttcgtctagcacactcatgtccatcatgcccatattctgcaggttctccagacttgcttccatgtcctcctgtaaagaggaagaagaatcgttaacgaccacctggaccaggacagggagctgctgcttgtcatctctaccctgacatcacttacctgcccgtctctggaatcgtcttccaggccattatcttctgtgccttcctcctccatcttcagtcctaattacagaataattgttcaatcagataacactcaagttctacctcataattagtttatgcagaatagatttcaatcttagaacagaacacattacaagataaactataagtctcccctctcctgtcacacgtaattttgtctcaatttgttttcttttttttttttttttttttttttttgagatggagtctccctgtgtcacccaggctggagtgcagcggcacaatctcggctcactgcaatctccacctcctgggttcaagcgattctcctgcctcagcctcctcagcagctgggactacaggcgtgcatcaccatgcccagcttatttttgtatttttagtagagatggggtttcaccatattggccaggctggtctcaaactcctgacctcgtgatccaccagcctcggtctcccaaagtgctgggattacaggcatgagccatggtgcccggcctcaattggtgttctaagtaagccatcaacagggagatgaaaatctaggattcctcttagattcagagtactctgattttccacaaaatatctaaaagtttccaaatatttcaaaaacactccaaacctaagaaaaaaaatcacaaaaaaatgagcaaaggataaaaacaggcattttcaacaaaccaacaaaaaaatgcaatacccatctagtaaccaaagaactgcaacataaaataacatattgagttagtgatttgctggctctccctatattccacccatttcaagtaggtctttgtcattttttagctcaagaacttttttttttcccccaaggcaaaaaggcaaaggctgccataaagtcgagaatcatcctgggttttgtgaccacaaaataactatttgatagaattctgctaggaattgcaaaaggaggccagaggagttcaagagtggaaaccttgagaagaaacttgaggctctatatgtatcaaaaaccttacaaatgtgcataccctttgttccaggaatttgagtcttaggatatctgacaaggagttcaaaacatagatatctgtcctattatacctgttaaacacccaaaagggaaacaaattacagcatattttcattcagatatggttcacaaccggggggaatggctggcaatgtctggagacattgttagtggtcatgacctgggggaacgccattagcatcagtagctagtgatgctggtcacgaccctgcaatgcacaggatactccccaaccccagagaattcttcggcccaaattgtcaacagtgccaatgctgagaaaccctgtgggacaccatccaatgtctcacaatatttaaagaatgtatgcttttaaagaatatttaatgaaacagaaaaaatgcccacagtgtaggcacagtggttcacgcctgtaatcccagcattttgggaggctaaggcaggtggctcgcttgagcctaggaattaagagacaagttcgggcaacaaagtgagacccccatctccaccaaaaatacaaaaattagccaggcatggtgttatgtacctgtactctgaattaccggtgagaatgaggtgggaggatgctccgagcctgagagcttgaggctgccacgatcatgccactgccctccgctctgggcaacagagtaagaccgagtctctctaacatacacaccgataaagaaaaatcaaacagaaaaaaatacatactttcccgtctctactaaaaatagaaaaacagccggacgtggtggcgggcgcctgtagtctcagctactcgggaggctgaggcaggagaatggcctgaagccgggaggcggagcttgcagtgagccgagattgcaccactgtactccagcctgggcaacagagcgagactccgtctcaaaaaaaaaagaaagaaaattaaacataaaaaacctgcagggtctacacctcaagagtctcactcaccactattatcaataatcactcaagaaatgcagtttaattgcatgtctcgcaacgtgagctttttccagtctatcatttaagacgcctaacaacgctagcaggttttattatctgcatttgacacgagaatttggttgagctccaaagctggcactctaaaactcagctgtcccacttcgcattatatctaaacacagcatatccttttgaaatacgttgtctaaaaatgtttggtaattgcacccaatttctaggcccctaaatagtagcctgcagtgcccacataggccggaaataggagaaatgctgaccaaaaagcatcacagaaaagctaatgtggcgcagacaggcgacgccccaatccccggcacctggcattggccaacgaaaagctgccgctgctggggacacagatgtaagaaaatccaactttaatcccacatggcatctaaaacttaaatttttaatccaagttttattttttccaaacccacctacaatgttgcctaggactcctaatcttggtgaagacccttactctgatttataatgaggacacttttccctcaacaagtttggctacttcagtttttgcaaggaagcagttactggtgagttcccagaatgagtccaactttggactcaactgaacactgctgcatagtgcttgaaacgaaaattaactggtgaattcctcctgatctaacagttgtatgtaatcacaggccctaactgcaaccacaaagtcctaaggctcttgtgctttatccattagccacgtgccccgacacctctagagaacatcaccagctcaggatggaagatgaggcctgcagggcctgagcaccacctgaagacctgggctctctctgggcttggttacttctctgaaaaaggaatgggaagggatcagaagcccttctaaccctcactagagctgaggctacaaaagtcctttttatagcaacagaagaactttatcatccaagctttcctgacaaaacactaactccaagtagttttgaatccacctaagctttaatctagacattcaggcaggtcttcaaagcactcagctaaagtttagtttttctaatgatgcaaagatcattagaaatgatccctgctaggccgggcacagtggctcatgcctctaatcccagcactttgggaggcccaggcgggtggatcacctgaggtgaggagttcgagaccagcctggccaacatggatggtgaaaccacgtttctactaaaaatataaaaaagtagctgggcgtggcgacgggcacctgtaatcgcagctactcaggaggctgaggcacaagaatcacttgaacccgggaggcggaggttgcagtgagccaagaccgcaccactgcactccagcctgggcaacaacagcaaaactccatcgcaaaaaaaaaaaaaaaatccctgttaaattcctgctaaaagccaaggatattttgagtagtaagtcttgaactttacagttttaaaatgagcacctacataaaaaacttttaaactttattgttaagcagttttcccaaccactaaaaaaagaaaattcacatcatgcataagttaacacctaaacagaagagataaactatatttcctgcgtagaccagtctctcacattctgaatgtgctcaggctgggccttctaggtgaaatacggacactcacaagaacagcaaaaacgcatccatgtgtcaaaattaaactttaacttaaagctcttatgcaacctaactaaaagatttaatctttcaaactacatgcacatgttttaaacagttaatgtgttatgaaacacattaagaagaaaaagctattaaaaaaatgaaattgttaaaaatgctacaatttctttctactttctaagcactgatcctccactgcctgaatttagcacttttccaagaaaacaggccccctgcacaggaaacctaaattatattatccttatcaccataaaacctaacaataccaactgggatagtcaaagcttcaaagttttatggaattcaatgctttcaaaaataactggtatcagccataaacaggaatgaagtatcaatacatgttacaacacagatgaactttaagcattatgctacgtgaaagctgatgcaaatggccatatgttgtacaattccatctacatgaaatgtccacaataggcaaatctatgcggacagaacatggattagtagttgccaggggctggagggagaaaagtaaggcgactaacttctaatgaggaccgggtttcctttttgggtgatgaaaatccagaaggagacggtggtggtggtggcagagccttgtgtatacactaggaagcactgaattgtacaccttaacctgatgaatttaacggtctgtgaattaaaccttcacattcaaaaaccgtaatagtaaaaaataggctgagtgcaaataccccaacaatctactttggaccctagcaaagctgagttctattcggtctcaggttggtgtccttttctttgggttaagacctattttttgaaccaggaaggaagccaagtaggtacatttggttcctcagacccgtagaagtagctttaagagcttgtctttctctagttgacttttaatcccaatggcagaagctgaaacgtttttcgtatattttaattgcacttggcacctgtacatctctttcctcctccctgtgcccttgacagagctacctgttaggtggtgacgagcaaagctaactcttagtggagggacaccgagtaccagagaaattctcccagcctagaaggcgggaagagcacactacacaccatttctctaaattctctgaacactcaagccccaagcagcatatgtacaatacctttaacacatctcttggctgacttcttgctggtggcttctaactcgatgccaatttcatcaggatcttgcccctcttctttaaccgcctattagggagagatgagttttacaacatcattaagagctgcagggcacacactgttccttacaagtaacaacctcccatgaaacaaaggcaaacccgtccttgcaaagagcaactccgggtcagctatctgggccgcaagcccaaaaggcggaggaggaaccccgcacaacttgggtctctctgggtccaaatgacaaaggagagggaggctgtgagcaggagctccagaattggggtcaaggaccagttccaaaatggcaactcaactcgacaatgccaaaccttcgactttaaagttatatgatgggacaaattagaacagagaggctgcacttggcccggcctcggtgaagggctggccaccgctggtgaggaggaacagcagccagcctggggagattcaacaggtccctcagtgcctgccacctgccgggtccaggactgggtacccacaagctccctccctatgctcaagttgtttgttccagttgcggaaacagacaattcccaaccccttaatattttgcatttagcccctgctttcagcgaggtgcgacacaaacgcaggatgagctggcaaggaggtggggcagcgcattaggaagggcgctcaggaaggtgatgtctcaggcagacccaaaatgacaacaaggggccggccacgagaagatctgggggacccgggtggacagcttcgtaaaggccaaagccctggggcaagaacaagcaccgccccctttcctgtaaatgctctggagtccgccagacacccattctccggaggaggaaactgaggcacagagagaaaggcacctgcccaaggtcacagagccaaggctcgatcgggagccccaggaggggtcccggggccaccctggtagcggagaagaccgcacgctgagcgcgcttgaggagaaaaggtggaaagaggataggaagggaggcacagagaggagcggtgacgggccaaggtcacacagccggccccctgggtgcccgacacctcgaaccggggtcggccaagacgcggggcgaacccagggcgccccgggtccgggagccgcggtgacaggtgcaggcgggggcgtgcccgggcctcctgcgccacccccgagccccgcgccgcctcaccttcttgagccgctccatcaggacgctcttgttgccgcccgtgtccaggttccgcttcttcagctccgcccgcagatcgatcacccgcagctcgctgagccgcctcgtcccagtctccgcaacgcccgggccgagagaagccgtgccagggcccgagtcgcccgacccgggcagagtctccgccatcgtcgcgttcccgtcttcgccaccgactcagtcgcacaccgccggcagctatagcggctctgaacacaaaatggcgccgcctaagaggaaaacgcactcgtttcctcccgccccgctttgcggccgcgcacgcgcacgcgcaccgcccccactagcgtacttagcagcaaggacgctcgcgcgtccaccaaccgcgggttccccggcacaacgcgcaagcgctgaatctgcagctcgcatgcgtcccggcagttcccggcgggaggctgacgagacgcaacgcgtctgcgcacatccccgcgttgttctcactgcgcatgtgcagttgcaaccgggatactagaacctacgcttggtgcgcctgcgcagaagcgaggcgcgctggggcgactggagcggttccctcgcaggcggcgccattttgtgctaggagcctgataaaaccggcccggttctgtggaaagtgggcggcggagccagggtccctggaatggcggagactctgtcaggcctaggtgattctggagcggcgggcgcggcggctctgagctccgcctcgtcagagaccgggacgcggcgcctcagcgacctgcgagtgatcgatctgcgggcggagctgaggaaacggaatgtggactcgagcggcaacaagagcgttttgatggagcggctgaagaaggtggatttggggccccgagggcgggcacagggtgggtctggggtcctcttggccgcgacggtggctcgcgggccctggcgtccgcccccggccgcgttcgcggcctcgccggacctggcgctctcgcgtcccccggctcctccgaggccccggagagagttccttggccggctgggcctgggttcaaatcctaacgccgcaatggggccaggagaaccacaaaaacggcacgcgtgcaggagaaacggtgacgggtgacatcgtccactgagaggagggttctcccctcgtctcgtcccctcctccgtacctggaggggagaccctgaaaccctcacttcccaggcgaggggaagggactcggccaaggtcacacggccgaggacgggcagcgtcgggatttgaacccaggccctgggattcctgattcggctgcttggtttccccagggaagatgctttgtgacccacaggggaccgaccagcctgaatcggggctgatttacaaaggaaacacccgtaggacatactcaaagggaaaaatagaaaaaaacccaccacaatccagttttcacggtttgccggtactcgctcggtgaagtaacgtggcaggaaggaaaagtggtgttgacggtagtgatcagaaatgtgaaatgaggggagaccccgggtggactttaaaaccagcctcagaactgcccgggaggcgggcagagcctgggctcccccagctccgtcagtctctctggacttggggaccctgccagctctcggtggcctgatcttgggcataggagaccttgaaccccttctgagtcctcttttctattctttttttttttttttctcctgtaagaagcaaaaaagcaataggactttgatttggggattaaataagtttgcgtggagcaggcttggcgtgctgcctggcgcatgtaaacactcggtgtgtggttgccatcacgattcgcttttcctctctgtgccaccacgagtcctcatttgcagatcgggggctctaacgcctcccttgggggattcaaagggatccctaggaaaagcagagaggcaagtaaaggttagccacctgcggtttccttattcctgtagctttttttctctgccttttttccacctggctactctgggacctctcccctgtagttgctccgcctggccgcccaccccccagcccctgcaggcagtggggctgttgacacatcccaccatcctgactccggaactacggagatcacagggctttattattaattggtgatgagaagaagtagggatttttttttttttttttttcctgatgagaaaccctgggctcaagggtggatagttgtctcggccagagtcacatgggccttttaaaagctcaagcttgtgtttcttttcactatggattctctttactcagataaggcaggaagcccactgatctacatatttacccagagaaaatgcagagagtggagattggcggctggtcaggtgtggtgccccgccaccagggcctcccatcagctaagccaaattaagaggctttatcctttttttctccctggacggtccataggcctgaaaagctgctgtgatcttcctgtcaagctggtgactgagacttcccatcactcgctgtcatctctgagagcacagatttgttccttcttccttctccttttcattttcttcaagatgtggtcccaaaacacgaataccgccagcccatatccctgtctgccactcacccaagccagtctggagttcctgatctcattctcttcccgtttctgtcatcctgttggtgtccctttcttggtttatttttccaggaagggcaaaagaacaaaaaggggaaacaggacacctgcctagggcattgcttctcttctcctggtggtgtttcagaattgcctgtccccgggaaaagggtgagggacttggtgattgtacttttccttgatcccaggaaagaacttcagtcccttttctggcttctgagaggagagatttttgttgctgctggtaaagatgagatgtggaacccccaggccctatctcaattcagacttacccacctgggaaacttggaggcttccaaacctctgcagataaaacatagtacatgaaatgatgtaaacaaaacttgtgctcatgggactggagagtaaagactggaaaagttatcagtaaaacttgacctgaagctaagtttctagggacgtcatcgtgattgacgtgttcggtactgatggcttagttgatgccaggcactgtgctgaggatgggcatagttgaagtgagtgacagagtcctggggtgggaggctgggcgtgccaagaaattcttataattcaatatccgatgaggcacaatcacctagtggttgagaatgaggtactggagtcggttgtgaatgtacatgatggggatcggatgaggtcatgcatgtcgtgacgggtctcgtgcgtaacacatagtaggatcccagtcagcgagcattagtattctgtccacacagtactgagtacaggcacggcgtggagggagtccctggagggttaaagagtattttgtgagtaaagtcaggggaaatggagagtgtgcctttccctttttgagttcttctgggcttaggaaggagatgaaccagataagcctactgtttgttgagtgcttccttttcatggctagtagagtcctcacaacagccttccagggtaagtactgtattattattagccgcatgttccagaggaagaagcaaaaactgagcacctaagtaaacctgcctgggaccacccagctaagaactggtggcgtcagtcggtctccagtgtagagcgagataacagatgagtggatgggccacaggtcctgggtggtgagggcggcagcagctttttgatcttaaaaatacagtttccttgtcacctgagagctctctgaaagcagtgtgtgagctgactttttggatcaactttacttttcccttctttttaggcaattgaagatgaaggtggtaatcctgacgaaattgaaattacctccgagggaaacaagaaaacatcaaagaggtctagcaaaggtatggaggatttcataagcaagtttcatgttaagtgctttcttcaaaacgaatacattgctaatgtgcctcgtttacttgtctgtgtgttggacttgtgaaccactctgaactgggagccttcagcgaagctttgcattttctttcaagatctctctactgtgttttgttttcttggtatctgggaattccaatggaggatggaaggagtatttgtcctttattcattttcctctgtagattgtcagcggtccttaaataaggagtcttttgggagtcagtcacagtggcgtgtgcctgtaattccaggcgactcggggctgtggtaggaggatcacatgagcctgggagttcaagaccagcctgggcaacatagcaaaacccagctctacaaaaaaacttttaaaggcccggtgtggtggcatgcatctgtggtcccagctgcttgggaggctgaaccggaaggattacttgaccccaggaggttgagatcagcttgggcaacatagggagacccccatccccaccaaaaagaaattagccaggcatgatggcatgcacctgtgatcccagctacttgggagttttaggagggggatcacttgagcccaggagctcaagcctgcaatgacctaatgattgcaccactgcactccagcctgggtgacagagcaagacccagtctctcttaaaaaaaaggggggtgggggcggggcacagtgtctctcacctgtaatcccaacactttgggaacccaaggcaggagaatggtttcagtctaggagtttgagaccagcctgggctgcctctatccactgccaaaaaaaaaaagtacctaggcgtcgaggcacgcctgttttcctagctacttgggaggctaaggcgggaggatcatttgaacccaggagttcagggttgcactgagctatcatggcaccactgaactccaacatggagtccaaaaagtaggactgcctgagcctcctattgcttggacttggagaaaataacatcccttataaacagcacttggcaaaaacagaattgtcactttaacatttcttttaaaagcagcttatacagtaaaagtcacattccacatgacatgactctcaccatcttaccgaaatctctcttgcccatcccccacaccctgtgctttagtcaggccccaaacacgtgatttactctcctggttctctgtgacttcgctccgcccacccttccccatctgtctgccttagagacctagttcctcaaaagacaactgatccatcccaccaatagcaactcgtctccttgggtcctctgtcctcccgtggcatagttccttaccccttggtttaatatttatgtcatcttgccttctgtcaagagcagattgatgaggactagggctgtgtcttgtttatctttctttccccttcaatggtttaacttggtaacactcaactattggcttaagaaagaatcagctgaggcagggcgccgtggctcacacctgtaatgccagcactttgggaggttgaggcggactggtcacctgaggtcaggagttcgagaccagcctggccaacatgatgaaaccccgtctctactaaaaatataaaaattagccaggtgtggtggcgggctcctgtaatcccagctactcaggaggctgaggcaggagaattgcctgaacccaggaggtggaggttgcactgagcccagatcgcaccactgcactccagcctgggcgaccgcaagactccatccccctaaaaaaaagaatcagctgaagctgggcttgtagaccgaatgttctcttggttcatgtagagttttccctatctgaaatgcttgggaccagaagggtttcattttttggattttgtgcggtattttcgtacgcataatgagataatcttgggattggggcccaaatctaaacaagaaatttgtttcttatacacctgaagataatttaataccatattttttataattttgtgcatgaaacaaaactttcactaattccacacatcaggtgtggaattttctacttgtggcaatatgtcagtgctcagaaggtttcagtttcagatagggttgcccaacctgtaattgaaggcctggttctcagggcccaaaactaaatgagataataactaatacttggtggtgaagtactgggtttaaatatctgagagtcaggccccagtgtcagccacagtgtttggggtaagtgctgggagaacagcagaatgaagtcacttctgtggctcatgatacattgcgtgtttttgcctttactcaagtatacttctgccaaggcaaagagtcctggaaaatcaatggagaaagaaataataaaagcaaaaaacagagcctgtggatctccttttttgttttcctttttcttctgataaaagcaaatacttgtactacaggcttttgttgctgtttttgttttgtttttgaggtgggttctcactctgtcactcagatggagggtagtcgcgcagtcatagttcgctgcagccttgaactcctggcctcaagcagtgctttcacctcagccccacaaaacgtttagatttcagttgtgagccactgcgcccggcaggttttaaaatacgtgcatgggagtaaaaagcagaagttgttcacagtcgggacagcccactactaaaagttaggcatacttctccagactgtgtgtgtatgtacaatgtttaaaagtaaacttaggcctgggttacagagcaagaccctgtgtctagaaaaacaaaaagttaaataaaagtcaatgagctgggcatggtggcacacacctgtagtcccagctactagggaggccaaggtaggaggattgcttaagcccaagaggtcaaggctgcggtgagccatgagtgtgcttctacactccagcttgggcacagagtgagagggggaaaaaagtaaatatataggtatgtgcacacacctgtatgcatatttttttcattaaaaaaacccgtgatcttgctatacaaaatctcactgttttttaacaggctaataatcttctgtatgaataaatacacaatttagcccatcagtctttttattactagacgtttggagatttttatttccaattatcactcggtacttccaacattcagtgtttgcacgaaccagagataaatacctttgtgtggtcaaagtaatataatttttgataacttagtgaaaggagaattctagactccaaggatatggccctttattttcacatagctagtttacaaatagctgtcccggccaagttcagtggctcacgcctgtaatcctagcactttgggaggctgaggtgggcggatcaaaagatcagcctggccaacatggcaaaaccccacgtctactaaaaatacagaaatttgccaggtgtggtggtgggcgcctgtaatccaagctactcaggtggctaaggcaagaagatagcttgaacctgggagactgaggttgcattgagccaagatagtgccactgcactccagccttggcgacagagtgaggctgtctcaaaaacaaaaacaaaaacaaaaagctgtcccaggttgtaccctaccaacaatgggtgacggtgcctatttcactaaactcaacatcaaacttaccttgtttgcctgttaccttgttgcctgttatatagaagaaaagtatttcattgtatttatctgcatttttctgcaggtgagattttcgtttgcatttcttcacagattatactcttctgataattggacatttgtgtcgtctgaatggccttttcatgccctttgccgatttctgtgctgggttgtttgtcttattgagttataaagactcatataaaatgtttctattgttttaatctgtcattcaatttaatctgattcgacttgtggtattttgatcactaggcttctagattttatgttacgctttaaaaggacttctttgcttttaaattattaaaaatatgactgtaaggccaggtgcggtggcacacgtccgtaatcccacgatgcaggtggatcacctgaggtcaggagttcaacaccagcctggccaacatggtgaaaccctgtctctactaaaaatacaaaaattatctgggtgtggtggcaagcgcctgtaatcctagctacttgagaggctgaggcaggaaaatcgcttgaacccgggaagcagaggttgcagtgagccgagatcacgccactgcactccagcctgggcgacgagtgaagcttcgtctcaaaaaaaaaaaaaactatatgtataactctgttatatatagaaagaataatatttatggttttatttttacattttacatttggaggtttaattaatttagaatgtattttgcatgtggtgtgaggtaggtagggatgaaaacatgaaacatttaggctgggcgtggtggctcatgcctgtaatcccagcactttgggaggctgaggcgggcagatcacctgaggtcaggagttcgagaccagcctggccaacatggtgaaaccccgtctactaaaaatacaaaaattagctgggcatggtggcggatgcctgtaatcccagctactcgggagactgaggcaggagaatcacttgagcctgggaggcggaggttgcagtgagctgagatcatgctgctgcactccagcctgggcaacagtgcaagactgtgtctcaaaaaaaaagaaaagaaacatttgtcatcagaaagatcacttctgcccctcccagtgcgtctcccctcccagcccctgcaaaaataaaagtcgctgttgtgattacttcaccagatattagttttacccattctagaacttcatgtaaaatggagccatgcaatactagctcttttgtgtctcatttgttgttttgttttgcttcttgtaatcagttttattctagaaatttacagtacattttgatatctgatagggcaggtcggtaagttttcttgaattattttcaactactttatcagtgggttttatcaagattttaactgaaaatagagggactgctgtaatgtgtgaattcaaaatgctttaaaattccagaaagcatatctcatgtaatctcagttctcctcctattgcttggacttggagaaaatgacatcccttttaaacagcacttggccaaaacagaattgtcactttaacattttttttaaaaactgcttatacagcaaaagtcacattccacatgacgtgactctcaccatcttagcagactctcaaaataattatcaggggctgtgcgagatggctctcgtctgtaagcccaacagtttgggacaccgacgcggaaggatgacttgagcccaggagttggagagcagcctgggtgacatagtgagaccccatctctccaaaaaattagaaaaattagtcagatgtgatggcgtgcatctgtagtcccagctactcaggagactgaggtgggaggatcacgtgagtccaggaatttgaggttgcagtgaaccatgattgggctgtgattgctctccaacctggtaacagggcaagactctgtctcgaaaaaataaaataattaccaggaaactaaatttatttgtagtgtcatcacaaagtacaaattaataggatgttttatggtgtttgagaatgttttgtaactggagatgcaaagttggcctgtttgcttggttaagtattacccaatcctttgctgctggcttgttttgttcagtttttgttcattttggcaatttcatacttaagttgcaagaataatgcaaggaattcccatataccctttacccagagtccccaaatattgccatctgactacatttgccttgtccttttctctccttgtatgtatgtttttactagaccgcatggtaagttgcaaggcgcatatgcccctttgccctacgtactgcagtaaagtaaggatattacctaactgtagatgtccagatcaggaaattaacattgatacaatactgccacctcgtcttagtcctcatttagattcagtagtttgttccaataatattctctataactcagacaaaaaatgtccagagtcatgcattgcatcaggttgtcatgtttccttagttttctttaatcttgaacacttacacttattttgtagtttatttttctatttgaattgttttgggttctccccgccccataataaggatcaagttatacgcttgtcagaaatacaccagacatgttgtattcctgttttttgttttgttttggtttgaaaccgggtcttgccctgttacccaggccagagtgcaatggtgcaattgtaggtcactgcaaccctgaattgctgtgctcaagcgatcctcccaccttggcctcccaaagagttgggattacagacatgagccaccacgcccagcctatattgtcatcagagtatactatccagaggcacatgctgtcagtttgagccattattggccatgttagctgacttcaaatgctattggccaggtttctccactggaaagttactgtcttccttttcacagttacatttgtggggaagatactctgagactttgtaaatatcctgctcatcgtccattagttttagcaaccaccagttcctgtctattcatttattctggtagttgccaaatggtgattttttaattttgttattgtttgtttattacttggtttactgacataaggaatagcttgccctttgccctcatttatctgtgtgaacttagattattttattccataggttgaaagcctttatgcttatttactacaatgtgcaaaacgttccattgggaaccctgtcagacaggctcccctgtcatttccacatgttcatgccattcttgggatacttttttaccttctggaatggcagggtacgtgagtctcatcttatgcttttcctgccctttccccggaatcagccatttcttccaggtgc[145 bp omitted]aaccccatctctactaaaaatacaaaaaattaggcaggcgtggtggcgggcgcctgtagtcccagctactcgggaggctgagg[139 bp omitted]tgtacttctgtaactaggatgtcaactcctgggccagtacttggtttgtgagagctactgggctgattgtacctcaggaaattaagtactgttaaagcaatccgaagcaagccaaagacagcttaagaaaggtgacaaagccctcatgaacagtttggcaaacttgctagctggttaaaattgttaatcacttctccaggattttttaggtgacagttatatcattagtgaatcaaagaattaagcatgttgccagattgacattgaaatgtacataacattcttaaatagtaaatagaattaacaggaaattttcaagtcctgcgaaatcactaattagagaaaaatttcctagatgtgatgactttttagcagagaaaattttcctagatatgatgactttttatcagaaaattgtcacttttctccacagtaacctaaaaggaaattttataatgtgttccataatagtctaaaaagaaaatgcacaagaataactaaaattctgggcgggggggaatacagggatttcctctaattttgatgataggatattgcaaacaacagaaagtttgagggtttgttcatttgatggtgggggaaagctctaatcttatctcttcttgtgtaaaatagaaattccagctagtttaatactttttataatatagtaataagaaagacctgaagtaagaataaaactgagaaacaacaaagaaagagaaatttggctacataaaagttttaactctctgttaagaaaggtatgcaacagtctgggagaaaatattatagcacagaataaggaagaaactcatatccagaaagcattgaatgttctgacaaatcagtaaggaaaacaggcaacccagtcaacaaggagcagagactatgaacaggcaatttacaaataaatgaaaaagcagatgtggcctagagaccaaaagattcccttgctggtagttgcagaatagcaaattttgaaatgacataagatttttgcctatcaaactggtaaaaatttacacagttccgcaaggtgcggtgactcaaacctgtaatcctagcactttgggaggctgaggtgggcgggtcactctaggtaaagagtttgagaccagcctggccaacatggagaaaccttgtctctacaaaaaaatacaaaattaaccgggtgtggtggcacgtgccggtaatcccagctactcgggaggctgaggcaggagaatcacttgaacccaggaggcggaggttccggtgagccgagatcacgccattgcactccagcctgggcaacaagagcgaaactccatctcaaaaaaaaattttttttacacagttcctgttctcctacattggcaagggtattggggaaggtgtaggtgttggagacaataaattgctacagcctttttgagaaggcagctaacgtggggaactgccgtagcatggagtcaaagatggaggtggatcaatacgcagtacataaaaatgtccaaggcctgttagtagtttctgtaacttgtgtcattgctcactaacaataagatttcatctcatcacaagcttatttccatatgtatcatataatgtatgtagatgcaagatgatgtcctgaggcaccaccaagctgggaacgttggtaacctcttaagaggacagtagggaaaagggaaggtattatagctttatacttcctatacttaggaggatgaatcttctgttactgcagtaaagtttaatacgtatatttgcataattagggaagtgtgtttgtgtaatcaaatcagaaagtaatgaaccacccacatgcagccctgggtactatgggagcatcccagcagaagtccagggcagcagagtcagcagtgagattggacagtctctgaggcagaagcttaacagaaggcaagagatggaatcccaggcagggagctacgagcaggcgatagaggcgatgacggtcatgcccatagctgagaccacaaactagggtgaagagctgaggtagaaggattcaaggggcacattggccttgatactaaagacaaatcaatggctcttcagtttttgccagagagttatacttttcccatttgcattcatttttggtttttttagacgtttttcttctctggagaatactgtctttcctcaagtcgtgatgattaataaacattccagtcagggatgtgctttatacgttgaagattaaacattttgaagattgcatgttctctcgacatttccagtcacattttacctcgggggagctttcccctgagaaggatttggctgcagtgtacctgtacatactgcttgggagaaaagtggtcatagaagtggaaaaccctgattctgtttgatgaaaatctagtacccctcctgaggaagagagaacaccgtatggagggcagcaagtttctgataagttagtagatttttcctattatctggaataggattggacagaaaccaacgtacgtatcatagaattgtagcaactttatcaaatgtaatcattctgtggcaatgctctggtatctcttcccagcatgtttacagagaccactgggttgagttccagctgttttttagacctcgaggcatgttttgccaaagaaataatggtataaaatggggatggatttcccagccaactgaccaaaatatcatgtattgaattctgttatcagtttgatagtcccctatctttgtaaataaggtaattctaaaaatatgaatgaaattagaatatttaaacgtcaattacagtacaaataattaggtttggaatttttgtctttggcttttctttttttctccccccaggatgttacatatttatccagttacaagaatagtttccagtatagacaaattaattgtcttttcttttttctttgagacagggtctgactctgtcacccaggctgagtgcagtggcacaatctcagctcaccgcaacctccacctcctgggttcaagtgattttcctgtctcagcctcccgagtagctgggattacaggtgcctgacaccacacctggctaatttttatatttttagtagagacagggtctcaccgtgttgaccaggctggtctcaaactcctgacctcaagtgatccacccacctcggcctcccaaagtgctgggattataggtgtgagccacagtgtcagaccttgtttccttaatactgcttgaaacaacacttagccttaaaaca[192 bp omitted]gaggcaggagaatggcgtgaacccgggaggtggagcttgcagtgagccaagatcgtgccactgctctccagcctgggctacagagccagactccatctcaaaaaaaaaaaaaaaaaattgattttcaggctggatgtggtgactcgtgcctgtaatcccagcactttgagaggcccaagcaggagactcacttgagagcctaggagttcaagaccagcctgggcaacatagtgagaccccactgctacataaaatacaaaaattagccaagcatggtggcacgtgcctgtagttccagctactcgggagactgaggtgggaggatcccttgaggatcccttgatgctgggaggcagaggctgcagtgagccaagacatgccactgcactccagccttggtgacggggtcagaccctgtctccaaaaaaaaatagactattcttcacactgggaaagaggcctggcaggaagtagttttcccaaagttgtgtgtttgatcagcttttctcccatgttcttcaaaaagctgagcaccgccttctataaggaatgctaggaagctgtgctggcagtagctctaaaacatgaaatgatgctacattatgccttgcctttgagatgtggtcttccagagtctatttcatggatttcatgcatgtgattttattcttcacatggaagacagtcaaagagtttaatttgagcatgcctattcctgacaccagaaatttcatttttgccatgcctaatgacttccatttttgcttcagttctgttatttctggtatcatcgtttacatttttctattctctactcattttatcatttgtatgaaaaagcaaatgactatataaatactgctgtttggatgaaggtgccagcatgcctgcccttgtgaactgttgcaaatgttataaatcatcaattagtaagaaaaattgggaggttgcacaaggggagttggggaaatgacttccctgttcttagcattgttggctgacaggagaagtatgaacctaagaaggtatgcagcctcttgatgtttttcacattttttaaaattactaaactctttttattttatttattttgagatggagtctgtctctgtcacccacaccagagtgcagtggctcaatctcatctcactgcaacctctgcctcctgggttcaagcgattctcctgcgtcaacccccccaccgagtagctgggattacaggcacctgccaccatgtccttctaatttttgtatttttagtagagctggggtttcaccatgttggccaggctggtctcaaactcctgacctcaggtgacccacccacctcgacctcccaaagtgctgagattacaggtgtgagccaccacgcccagcctaaaattactaaactcttgaagaaaaacctggagttaagccataccttccaatcgttttttagtttctttttttttatacttaatcttagtcttttttttttttttttttttttaaagacagtctgtcttgctctgtcacccaggctggagtgcagtagtgtgttctcgcctcattgcaatttccacttcccgggttcaagcgattctcctgcctcatcctccccaagctgggattacaggcgcctgccaccacgcctggctaatttttttgtatttttagtagagacgcggttttgccatgttggccaggctgttctcaaactcttctcttgacctcagatgatccacccgccttggcctcccaaagtggtgggattataggcatgagccaccacgcctggcaagtattttctatttagaaaaacatggtaatgccacatatctaaaactggaacaaaaataacagatcagtggaagagaatggaaacaagtaatcccagacataaatacaaatataatattgcggaagccaacatttcaaattggtcgggggcaagtactatttagtcagtggtgctgggaaatcagtttccaaatgggacaactattgggaaaatagtctcactcaacatgaaactgagagaataaatgtttaaaacttcaaaagaactaaatacaggtgtatattatttagccttcagtatggaggaggacatccaagcatgaaggtataaaccacttacattttaaaaacaattaatagcttggccacataagagtgaaatgggccagggcgcggtggctcatgtctgtaatcccagcactttgggaggctgaggcaggtggatcacctgaggtcaggagtttgagaccagcctggccaacatggtgaaaccccatctctactaaaaatacaaaaattaactgggtgtagtggcaggcgcctgtaatcccagctactcaggcggctgaggcaggagaatcacttgaacccaggaggcagaggttgcagtgagctgagatcaggccactgcactccagcctgggtgacagagcaagactccgtcccaaaaaaaaaaaaaaagaacagtgaagtgtactcaaaacctgtaaacaaaatttaaaaactggtaaagaactgggaaaatatgttttgtacatatgatatataaacttcaaatgatgggggatggagccgaagtgttttgtttgtttgttttgttttgtttttgagatggagttttgcttttgttgcccaggctggagtgcaacggcaggatctcggctcaccgcaacctccaccccctgggttcaagcgattctcctgcctcagcctcccaagtagctgggattacagtcatgccccaccacacctggctaattttgttttttgtttttttggttttttttagtagagacagggtttctccatgtcagtca[131 bp omitted]ttagaaaagtacaggtgatcaacaacaaaaagcaaatgattcaaagcaatttgagtagtcaggagataaattcgtgttaaaacagtattccttttcttacctagcatattggcaaagataaagaaaaatagcaaatttttaacagagattcaagaaagattggctttttttttttttttttttttttctggagatggagtctcgctctgttgccagactggagtgcagtggtgtgatctcggctaactgcaacctctgcctcccggattcaagcgattctcctgcctcagcctcccgagtggctgggactacaagtgcacgagattggcactttttaattcgctgttgatggaaatgtataagttaaaaaaaaaccttcctctgcaatttttgttttgttttgttttgtttttgagacagagtcttgctctgtcatccaggctggagtgcagcggcacgatctcagctcactgcaacctaaacctccagagttcaagcgattttcctgcctccgcctcctgagtagctgagattactggcaaccgccaccacaaccagctagttttttgtatttttagttgagacagggtttcgtcaggttggccaggctggtgtcaaactcctgacctcaagtgatccacctgtctcggcctcctaatgtgctggacttaacaggcatgagccaccgtgcccagcccctctggagtatcttgatagtatgtgggttttttgtttttcttttttttttttttttaaccgagtttcgctcttgttgcccaggctggagtgcagtggcgcagtctcggctcagtgcaacctccgcctcctgggttcaagtgattgtcctgtatttttagtagagacggggtttcaccatgttttccaggctggtctcgaactcctgacctcaggtgatccgcccgcctaggcctcccaaagtgctgggattacaggcgtaagccatcgcatccggcccttcttttttctttttaagcattaaaaatgtgcatactcgggcatgcgcagtttctgtgggaaaacatgttccttaactaaaaggcagcacatttgcaacaaataatttttccctcaaacaaggacacttgggataggaagaagggcagagctgaggacaggtctgatcctgttcaactttactaagaacctgttttctgcacttctacttccacagctcagacaagaacagaacctcttctgcttgggggtggggcagggctgtcttgtgcggaatggcctcattcctggattaggaagtgttcctaagtagtgaggtgtctcagatgtttataaagtgaccacttgtgtagtgctcagggcattgttgcttctgtaaagtgcgtatcatttgatctcatgctgtaaatgattctgtcttcagggcgcaaaccagaagaagagggtgtggaagataacgggctggaggaaaactctggggatggacaggtatgtgcagccttgcgagtgagtagcgtggtggatggaccagtggcggtcacatgatggttcggtctggttgtgtcacaggaggatgttgagaccagtctggagaacttgcaggacatcgacatcatggatatcagtgtgttggatgaagcagaaattgataatggaagcgttgcagattgtgtcgaagacgatgatgctgataacctccaggagtccctgtcggatagtagagagctagtcgagggggaaatgaaagagcttccggagcagcttcaggaacatgctgtaggtaaccggcaatgtctctagaatgtgccctgaatgtatcagttccacaattaaaataggtgatcagtttcatattgggaagtaagttgttctgtaatgccagttcagtagaataagggtcagttggttcagatgattctgaaccaatttgttttgttgaaaggtgatgtcttataacatttcatatgtacttgctatccatttgcggcatacagtatgagacattttgaggacaaccattcagactcttcctgttgccggacttgatctgtggtgttatggcctaggtaccttgaaagcattgaactaggaagaggttagaagttggtgttttcctgttaagaagcaattgttgagctgggtgccttgatgcactcatgtaatccggtaactcagaaagctgaggtggaaggagcagcccaggagttcaaggctgtactaagctatgattgtgcaattgaagtccagcctgggtggcagagtctgacagaaccctatctcttgtttaaaacaaacaaacaaaaaaaaaaacacagccagttgatacctatcttaagagttaacctcaagtattaacctggatgttgtttttaaacctaaatttttttcctgttagaaacatatcaaatggatagtaagattatagtgggtagtatttcctgaatactacctaccaggcattggcattatgcccttcctttcttttttttttttttttttttttttttctgagacagagttttgctgttgttgcccaggctggagtgcagtggcgcgatctcagctcactgcaacctctgccccctgggttcaagtgatctcctccctcagcctcccaagtgagtagctgggattataggcgcccaccaccaagcccgactaattttcttgtatctttagtagagacggttttcaccatgttggccaggctggttttgaactcttgacctcaggtgatccgcctgcctcagactcccaaagtgctgagattacaggtgtgagccaccgcgcccagcatgtgccctttaattcttctaatagcaacatgaggtgctgttgtccccattttcagttgaggaaattgggaaggcaagaactaaaaaacatctccagatgacacacagctcataacagaataagaactaagatcaggctaattccagaggccatgtacttaacttatgtacgatgttgtcttggtgccattaatttgatattaatttcatttacctgatgattaatgtttgtcagacagaaaaagtgatgcatatgagaagctgtggggccctttctgtgttggctcgtggggggccctgttcttgtcctggtccttaggtcttccgcagtgagtgcttctcaagcagtcttggtggacagaaaccttgttgtatgccagtcaatccgcttctgcatttcttcagaatatttttgcatttcctcttggaactgattccaagtatccttagaggtagcagattgtcatatttgaatggaggatttgagtctgagaagtggctgagagttattctgatacaaatagggtgtgcaatttttggtgagtcccattcatcagcttctaaaaaggagtagcagaaacacttgcacagcagcaggagttacttacccttcctgaatggctgcatcttcttaaggctgtttttttccctcctaagcagaaaatcatacattctgcaacaaaagctggaaacatcctaaatgcctggaagcagtttagttttaagggttgaggccaggtgcggtggcttggctgggcacagtggctcacacctgtaatcccagctactcaggaggctgaggcaggagaatcacttggaccagggaggtggaggttgcagtgagccaggattgtgccactgcactccagcctgggcggcagagtgagactctcaaaaaaaaaaaaaaagagttcagaggtagattctggagatggatcaatttctgtgtgtccctggacaaactccttaacctctgctcctcacttgcaagaggttttcggaagattcaatggatggatgtttattatacacttaaagcagaagtcatcaagttggctgtcacctgggttgtttttgttttgttttgtttttgttttggggtttttttgtttttgctttgttttgctttttttcaagacagggtctcatggtgtaaatgaagttttctgagagcacaaccacacctattgatactgttgtctatggctgcttttgtgctttagtgtcagagaggagtcctgactcatctgttctacaattcctgaagaatttactaggcagctccaacaaagtgtttcccagcctagttcaatgcctagcatctagaaagcaccgtagagttatgaaatgtaccaccacgaatacagtttttactgcagtgtaaccatcaaaatgaattaagcacatctgtgtgaactcaaacaatctccaaaagagaagtgacacttggggagggttcagaatgatgtgctgcccctggtgcagatgtctaaggggagatggtctttggcacttaaacacgtgtgtagcatatgcgatgaccactgcatggcaggaagaaaggagtagtggagagtggttttcagtgaatgggcttttgtaccttttgagtcttctgatcgtgtgcgtgtctttcctagtgaaatatagtgataaaaatacatgctggttataaaatatctgaaaacgtctccccctaagtatatctcaaatttcagggctttagagcagatggccaaaattggtttcagtcacaaattatctgaaccccctttctttgtttggggaatcctttgccttattgggcagagcctacttcttagaataaaagctattcttcccctgcaagtagggcataggatattgccagtctcgagctcctgtcctcaccctcatgctgggagatgctgttccattgagggaggtacctaccccaggggcagcaggtcccacatcctcagcatccaggctgggcgagcagcggtggctgaaggctccacttcagcaggactctagccattgctcctggaagaacagccctcaccctgtgctcagatccacttagaggctgtgcactcattttcatctcttttctgtttgacttagactttttttctttcttttgcatcttaaaacctacatagctaccatattagtagatttcctagtctatgtgcaggtggacatttacatacaacttttttttcagtttagctgcaattatactataatagtgttttgatttctgccctgggtttaaaattttgttgtgaattattttcatagctgttcacttttcattgtacagatgtaccattatgttacgttattgttggtgtgatgaactgtattttctccatttattttacagatagaggacaaagaaactataaacaatttagatacttcatcatctgacttcactatattacaggtaaactgttgtatgtctcagtacttttagaatgaaaggtcagaccacaatttctggaatccatttcagacaccatatgccagttccagctaataatcaccacaagggttgtttcctttgtcaggatcgttaatgggtgtttgctttctgctttcctccaaatataatgtacgcattgccagggacttaactctaggcttcgacgagtggcctccaagcgctgtggcttaccagcagtcattagagtcatgttttgtggcattcttaatttcattgcttgtggcaggggaaggcagcctgtctcatctaccctgggtggcatcccctgcagaaagatgatttgatgagacagcaagagggcatggctacctgggaaagatgagtagggcccagatggggattgagggttgacagagccctgttggggaaggtggggtctcaggggttctggtcttgtctttgggaagttttttttgttttgttttgttttgtttttgttttgttttttctgaaattgcccagatttcatttaatgactgtatcatcctacctgtttcattggcatctctgtaaatattaaatcttagatgagaacagatgagttgagaatttccaggtatgatttttatatttgtgggtcttgagtttcctttttttttccagcctacatagatacaaattgttagaacacacttacctaggtagctggctaattcttaggagaactttttgtggagaaatgaagatcgagccagcttttgcccagcctttttatttatttattttttttcccgtcttctttttaaatgtcatctatgttattgtaattagaaatccccttttggaaaagatctccatttgcttctgccatgcaagggcaagggagatactggaaagccagagctccaaccttgaggagggcacaaatctcaagaaaacgtggtgaaacccagttcgcttttagagctgccgtctctccacctgcaaattgacacggccattcccgactcagaaaggagaggaggagccggatcttgtcactttcccctggctctttcttggtcacagtctcccatgttaaaatgggaaacctacagtctctcctaaacaaataggaatgtatttgcttctctttagagaaaatgaggaagaattattctgccaacattgatgatttgcttcagtcctatggtcagaattcccagcatggggtagggtacatggggaaaaaactgattaaaaataagtgaaagcatgaggaaagtgtacagtttcatagagcatcctggaatggcagggcagttcccaggggaagttataattcagtcacacctacttattgggtatatgtgaatcccctgtgatgtgtcaggtgtggcattaactaccagcattacatagatgaatgagaaggaagggtggtccccatgctcgtggggcctggcctgatggttaacagtgcagactcacactcatacacggcctttgctcagagcctgtctctgcttcccacctgctgtgtgtccttgggcaagttactcagtctgtctggtcacagtctgttactctgtaaaaagaagggtgctaccattaggaccaacctcctgcaaccgatgacgagtctgtgtgtatgtaaggtgcttacatttgtgcctggaacctagtcagtgcccatcagttgactggaattccagaggagtgtaccttgtgtgcacaggaaacataaaggctgggggatcacatcatgtggaaaaagctcctttgcttagtggggcacagctggagttgggttagagggaaatagggaaagccttcctgaaaggagatgccactgagctggatactgagggatgtggatgacttggctggacggggcaggggagggctgggcctgtcagggagggaggtggcatagggatccattggctgaaggctgaaggccacagagggacatgagcttactgtggacacaaggtgcagagagatgggatggggataatacaaccagatgccacagtaggcaaggatggcaccagcctgagtggacagggcttcctgggaagagtctgaatgacttctagaactggcctggtgggaacactgattggaagaggagatgaaggagggagggtatttacaaagtttttcatgctggcaccaccatgccaagtaagagcaggagtcataccacctgggcccatattccctcagtctttcgaatatcagaaagttgtcgtagcttcattgagtgaaaaagtgactgttaatgtgccatgcattcctctagatgctaacagtagaaaaatgaaaacactgctctccttgaatttgagagttcaatctagagggtcaggcgtgcttatgatgagtgcctcaccatgaagtgagaccagttccaggctcctgcaggggagactgaatggagggtgggctgagtgaagtggatgccagtcttatggagccattcctagaacaagcaggttctccacctcttgagtttgtgagtttccctccctggatttttaaaattccctctttagttattctgggttttcatttaaataaactgtaggtgtcattcatctggcacagtcttatttacgttttttcttgcaggaaattgaagagccatccctggagccaggtactgttaaatgaaaaacttaccagcgggggtttggaaccattctagttttccaccttctctaatttgaattctttgatttttaaaagttaccttactatagtatacattgttctaaaggtttacaatccaaaacctaccaggatcatagagattggaaacccagccatatcaccagatctgtgaaagtggctcacttctcattttacaaaatgtattggtgagatgaaagtatctcatgcctttttgaatatcaacagcattgaatcatacatagagaaagagttccagatgcctctcttgagagctaatacctctgcacccacaaaacagatcttgtgatattgggcagtagcttaattttgttgtttttaattgaggcagctcaggtagtggtagggagatacattttaaaacataaatttgagacataactggattccagaagaggaaagagtgtcttcatgagaattccaaacactgttcactttctggactgcaaatatctcagagcacggatggaagagattctggttttcatgttggactgttctgttaaaagaaattcaaagaaatttggaaattgagctgttcagtgaatggtgatacattcagttaagcaacttggactttggaagctaaatttggaagagtcatatctaaacgacgacagaatgaagactgtcaagaatcagccagaaggttttgggggttaaatctctgggatgcttttctcttccgtgtagcgtagaggcttacctagaggcggtcgcggcgcaggtagtgtaaccagtataactttgtgtacccgcgggttttccaatctctgtgtagctagcagttctcttcgtgttagtgtggcagccgtgccagttccacatttgtgattgctttatttccctggtaattaaaccttgtgccattctattcctgttaaatccgtagaaaatgagaaaatactcgacattttgggggaaacttgtaaatctgagccagtaaaagaagaaagttccgagctggagcagccatttgcacaggacacaagtagcgtggggccagacagaaagcttgcggaggaagaggacctatttgacagcgcccatccggaagagggtgatttagatttggccagcgagtcaacagcacacgctcagtcgagcaaggcagacagcctgttagcggtagtgaaaagggagcccgcggagcagccaggcgatggcgagaggacggactgtgagcctgtagggctagagccggcagttgagcagagtagtgcggcctccgagctcgcggaggcctctagcgaggagctcgcagaagcacccacggaagccccaagcccagaagccagagatagcaaagaagacgggaggaagtttgattttgacgcttgtaatgaagtccctccggctcctaaagagtcctcaaccagtgagggcgctgatcagaaaatgaggtttgttttttctcagttttagaccagacgctatctccttttcattggtcatgtaatgacacacataagctgtttttttctgcaattggccagccagactgacgaaattgtagttttgcttctaaagaatgtttcgtttctctttgtgtgtttttaatgggtgattcaattccttttctttttctcaacctaccatggttgtgttcttaaattcttcctaattacctttagcccagcagaattaattaactcctgtgggtctgaaatcttatggttaggtcagattttcaatacaagtttgtcggggtatcattttttcagaactaaatttcgggtaggtatgcaacctcagcacgaattttatggttttgagtttgtttcctccatgctgcttccttgtggagtgacattgtcttttgtctctagttctcccgaagatgactcggatacaaaaaggctttccaaagaggaaaagggtaggtcacctcggcgacaccagtcccttggagcatgtatggcctgggcagtggcgggtatttgattctggttcatcgcgtgctatgctccttacccaggagactcctgagacgtttgtgcagtctttctccttctctgctgttaccgctacaggttctgggttgtaggaagcataccaggtcctaagagttaacaggctgatttggtgcagatccttgtgttgggagcacattcatcctgtaacccttcattaaatgcattaactgagaaataattttaccctaccaaattccttcttaatcagtgttctaaaggagtaaaaacatgggatagatacagagctatacgtggaaagagaaacagtgcattgttgacaccaaggttgactgttctgctacatggccgttgcacactgcacttcctcctgtaattaagcgatcgctaactttttttgagacagagtcttgttctgttgcccaggctggagtgcagtggcgcgatctcagctcactgcaacctctgactcccgggttctagagattctcctgcctcagcctcctgagtagctgggattataagcgcccgccaccacacccagctgattttttgtatttttagtagacatggggtttcacca[137 bp omitted]atagccccactcagtattgtgacgggccctgtggtagtgctgctgggcctggtgttgcactggaggctcttggtgaggatagtggtcaggcccacagccccatttggcttttagtgctgccactgcctcaggaaaaatgggaaccatgtctcttttggaaaggttgtctctaagactcaagatcttgtgggtatttgggtttttactagaattttcttttgaaataggtcgcagcagttgtggtagaaatttctgggttagtggactctcttctacaaccagagctacagatttgaagaatcttttcagcaaatatgggaaggtaagtgccagagcttttctggagaagatactttgaaaccagcgttgtgtggcctttacatggaggtcctctcccctcagtgagttctttgagagataccaaggagcttacacttgctaatggctggggagggtctgcccgtccacaggtagaggtgagagtggtgtggaagcttccagagcccacatcaccactgtatttccctcccttctctgcgagcttgcccccttccctgtgatggctcgtggatccatttctgtgtcctcaggacgtcgcactcaggctgggctgccagggttggctggtggggtgctggtcagcatgtctgggagacagcagtgttcttagaacagtgttcgtgatgctggaactcagaactcagaacagggaccctggagtctgatgataggggtcctcaccacgggtgtcttgggtccattgactgaacctcacctcagcagctgggggctctcaaagttgctgcctcagttcaccactgggggcagttctagtggcctcttgtctgcagcacctgcctttcctgagcccgtgaaggtggggctggtggcaccagccccctacctgcagtgcccagcgcagccgcctggccctcctccctgtgctttctcactcccttcctccctggtgtttcccagacttgcctcccaaacagcctcctgcattcagggctcctcgtctctctcagagtcggtttcggggactaccaaaggaaggagtccaatcctttgtgttacacagtgagggttcaacacattgcaatatagaaaaccaagtgttttccctgatactgacttcgaagaacttaaaagaggataaaacaggctgggtgtggtggctcacgcctgtaattccagcactttgggaggccgaggtgggtggatcacgaggtcaggagtttgagaccagcttggccagtatggtgaagcctgtctctgctaaaagtacagaaattagccgggcgtggtggcgcatgcctgtaatcccaggtacttgggacgctaaggcaggataacaacttgaacccaggaggtggaggttgcagtgacccgagaccgtgccactgcactccagcctgggacagagcaagactccatcttaaaaaaagaaaaaaaaaaaggataaaactaattatgtcattattacggacataactaagggcttcttgagcctcagtgatacaaggtgtgtggctggcaacacctgcgccaagtctcccctactagaccccctttcctgactccatggcgtcccccagcgggtgggtgtgctcagtggggaagtgttgccctggagactgtagtgtcttgagcgcagcaggcctgatgtgggttaattagaggaccgggcctctctgagaatgtcctctgggactaggattccatgtggcatgatgagcatgattaccagcctcggccactggctgctgcagggcttttcctgagccatggtgtcttctgccgtcaaagggcgaccctaactgcatcctgctggagtcgagaaaaccaggtagactggaaaggatgtgtctacagtaactgaaacacatcactgcgttttgttacagtcaatgatagggcagatctgagttccagagcacggctcacagacctttccttgcatcagtctgtgccgaagtcttttttttttcttttttctttttttgcccacattacatcacttcataatttaccacctacgtagcatgactgtatatttggaatcatttcttcacaagttttagaccatattaaaggaacactggcagaaccctgtttgatttccctttcgtctgttcccctacattgccctcctggcccccttgaggaactagatgagcgattagaactggccagaggtccttggaggaacaacagcgaaacagaagcattagtagcattgtcctccccagtctaacacttgtcggacccctgatgagcagacttccctgtggggtgttcatatccccatgccccgctcagtgggcttcatgtctgagtcatatttgcctgctttcctttgaggtggtgggcgccaaggttgtgacaaatgcccggagtcctggagctcgctgttacggttttgtcacgatgtccacagcagaagaggccacaaaatgcattaaccacctgcacaagacggagctccacggaaagatgatctccgtggagaaagtgagtggccgttttcttcccaggatatagcccacattaggaaatgggggtaatacttgattctctttttcaggccaaaaatgaacctgtgggaaagaaaacctctgacaaaagagacagtgacgggaaaaaggagaagtcgagcaacagtgacaggtacccctccttcctggctaaattaaaggggcagggtgttttttgttgttgttgttttgtttttgagatggagtcgcgctctgtcgcccagactggagtgcagtggtgtgatctcggctcacctcaactccacctcctgggttcaagcaattctcctgcctcagcctcctgagtatctgggactaaggtgtgcaccaccacacccggctaatttttgtattttcagtagagatggggtttcaccatattggccaggctggtcttgaactcctgaccttgtgatccgcctgcctcggcctcccaaagtgctcggattacaggcgtgagccaccatgcctggccggggcagggtgttttaaacagaatctcactctgttgcccaggctggtgtgcagtggcaagatctcttttcattgaacctccacctccctggctcaaccaattctcatgcctcagcctcccgatttgcttggattatagccatgcccatttgtggttttagtagagatggggtttcaccatgttggccaggctggtctcgaactcccggtctcatgtgatccgcccgcctcatccccccaaagtgctgggaatacaggcatgagccaccacgcccagccaacatgtctgttttttatagatctacaaaccttaagagggatgataaatgtgacagaaaagatgatgctaagaagggtgacgacggaagtggagaaaagagtaaggaccaagatgatcagaaacctggcccctcagagcgatctcgagccacaaagtcaggtgggcagctcatgagcccaggagattctgtcttgtttctgtgcctagtggagtttgttagtttgctgtgattagctggcaacggaaactggattcatgttgcagagggtttttctcatctgggtattcttggttttccacttacactttccccgtcttttctgtaggaagtcgagggaccgaacggactgtagtaatggataaatccaaaggggtgcctgtgattagtgtaaaaacgtccgggtccaaagagagagtgagtattaattttctaactagggtattttgctcttcttttcagtttgtatttctgtgtgcgtcttagggaattactaagcttcatttgaaaaaagcttttgtcggccgtttcgaaaatgtagaaatctcaaactattttttttgagacaggttctcactctgttgcccagactagagtgcagtggtgcgatcttggctcactccaacctccgcctcccaggctcaagcgattctcctgcctcagcctcccgagtagctgggattacaggcgcacaccattatctttttagtagaaacaaggtttcaccatgttggccaggctggcctcgaactcctcacctcaggtgatccgcccgcctcggcctcccaaaagtgctgggattacaggcatgagccactgcgcccagcctcaaattattttaagaaatgcagaaagctttcctttatccttacttttgctctgataactgttaacttattttctaaagctaactttaaaatttacatatgggactgttggcttttccctgagtcggtgtgtggcagtccacgttccctgtctaccctgaaagtgtcagcacctccccgtgatgcattcctacacccagcagtgtggagcatgccatggtgacctggcccatctcgccagcctccctctagcctgctctccaccttgaccccttcctgtactcttatcttcttgctgggctgcagtgtgagctgagcatggtggctcatgcctgtaatcccagcagtttggtatgctgagctgggaggatacttgagcccaggagatggataccaccttgggcaacatagtaagaccccatcttcacaagaaatttaaaaattaggcaggctcggtggtatgcatctgtggtcccagctactcaaaaggctgaggtgggagaatgccacttaaacctgggaggtcaagactgtagtgagccacgttcattgcactgcactctagcctgggagagagagtgagaccccatctcaaaaaaaaaaaaaaaaaaaaacacacacctattatttgcatggtctgtgcacaccgagccacccttactggttaactgtcaactggggacactctgagagccaacttcccagttgccagccaaggaccaatcttggcagcagcccctccttaaggaaggagagggaccttggacccgcctggtcaaccctcagctgcacggaggaggaaccatttcacttggtgaatggagcggattgcttaggagctttcagtctctgtgtgccagtattataatatgtcatagccttttacccttgttctataaaacacctttggaaaacggaaaaaggaaagtgtgggttctagggataaaatgagaaggtctcttaacaatgtcattggcacaaataaggtacttgtcaagtgtaccggaagtgcttcatttgggaactcattgtgtgtttaattattgaaggaaaaaggaaaattaagaaatttatttttgaagcaaaagacataaaaaattggtgttttgatcttatatgaagttttcgggggcaatactcatttccattttttctctattaaatgtactgttagatcatattttagcattaaatgttgatgaaattctgtgtctttcaattatgataagcaaaatgtaaggcttgtttggattaaacagctcatctgtttttcactaaaagttattcatcacataggacctccacatctgatggttaggcatggatatatatacctgattcttcctgttcccctatcacacctacttttaacttttttcatttttttattttattatttattttttatttgttattattattttttagacagtctgactctgtggcccaggctggaatacagtggcacaatctcagctcactgcaacctccacctcccgggggtttttaagtgattctcctgcctcaccctcttgagtagctgggattacaggcacctgccactatgcccggctaatttttgtacttctagtagagacaggatttctccatgttggtcaggctggtctcaaactcctgacttcaagtgatccacccgtcccggcctcccaaagtggtaggattataggcgtgagccactgcgccagcaatttttttttttttttttttttgtcagagtatcgctctgtcgcccacactggagtgtagtggcgcgtcctcggttcactgcaactactgcctcccaggttcaagggatcctcccacctcatcctccaaagtaactgagattacaagcatgcgccaccatgcccagctaatttttattttttatttatttatttatttttatttatttattttttg[233 bp omitted]agcctcccaaagtgttgggattacaggtgtgagccactgcgcccggcaatttttatatttttagtagagtcaaggtttcaccatgttggccaggctggtctcaaattcccaatctcaagtgatccacccgccctgaactttgaaagtgcttggattacaggcataagcctccgtgcctggcctctgctttaactttttaatgttctttggtgaactaggcttccaaaagccaggatcgcaaatcagccagcagagagaagcggtccgtcgtgtcctttgataaggtcaaggagcctcggaagtcaagagactcagagtcccataggtgagtagggatccaggaacggtttggtgtttttcctagaatgtggtcatgactgtcttctggaaggatgtttgcagagttccctggggtgggatagagctgtgaacctttttgctccttcagctttcagttcatagacttgttatgttttaactttcatcctacggctcttttcttttcttttcttttttctttttggagacagagtcttgctgtgtcgcgcccaggctggagagtgcagtggcgtgacctcggctcactgcaacctccgcctccaagcaattctccagcctc[134 bp omitted]tggcctcccaaagtgccaggattacagacgtgagccactgcacccggcctacttacagctcttttcaaataagtctcttcccaaagattgtagaaggtaacaaaggcagggagatggaatgccttccagcgtcagtagtgctcgtcaacaaaaaataccaaatttgctccagaagatgtgaaagcaggaagagagacagtgaggtagacccagcgagggcactgagagggcttcctttttttttgagatggagtctgtgtcgcccagggtggagtgcagtggcatgatctcagctcaccgcagcctccacctcccctgttcaagcagttctcctgcctcagcctcccaagtagctgggactacaggcgcaagccaccacacccggctcatttttgtatttttagtagagatggggtttggccatgttggccaggctggtttcaaactcctgacctcaagtgatctgcctgcctcggcctcccaaagtgcagggattacaggcatgagccactgctccaaggactgacagggcctcattcttaaataagtcaagaagtaaacacaaacgttattggcgaattacagctaatttattttttctatgaaatacttcgttaactttagttttaaaagtaaggacccccctgggcgcagtgtctcacatctcagcacttcgggaggccgaggctggtggatcacctgaggtcaggagttcgagaccagcctgaccaacatagtgaaacgcagtctctactaaaaatacaaaattagctgggcatgtaggccaggcgcg[138 bp omitted]gtggcgggcgcctgtagtcccagctactcggtaggc[224 bp omitted]aaaccccatctctactaaaaatacaaaaattagccaggtatggtggtgcgtgcctgtaatcccagctacttgggctgaggcaggagaatcacttgaacccaggaggtggaggttgcagtgagccgagattgcgccactgcactccaacctgggtgacagagcgagactccgtctcaaaaaaaaaaaaaatcagctgggcgtggtagtgcatgtctgtaatcccatatacttgggaggctgaggcgggagaatcgtttgaacccagggggtggaggttgcagtgagccaagattccaccattgcactccagcctgggcaacaagagcaaaacgctgtctcaaataagaaataaggacaattagtttaaaaggagggggagagggcactgctctgcctataaagttatcacccttttattcccttttttttttccgagacggaatcttgctctgtctcccaggctggagtacagtggcacgatctcagctcactgcaagctccgtcccctgggttcacaccattctcctgcctc[181 bp omitted]ctattcctttaaaaagaaaaaaaaaaaaaacaaagtctcccatagtcctgtgagtgcaggcattggcaggtggcatttctgctgggggagtaatgaacacgggcagcctggggggcccccacaggagcctgccgtgctaaacactagagtgttccagaccctaggcccctctccatatctggcgtagaggaacctatgaacaaggaagtgtgggcttgggtatcccgtcaggttgtgagcatttggacacaactgaaaagttcccataaaccgcagccctttcatactaggggctcctccggaaggtgctgagatccacagaggcaggtgtgggcggatccaagacatgttgggtgaactaaggaggttgcagtcatttgagtccagaacactatgaggcaagattatacatttctgctgggacagaaacacacagttgtcccagaaacgactggcctcagtacccttgtggataccaaaatttgcagaggatcaagtttctgatataaaactgtgtggtatttctgcatataacccatgtacatcctcctgtacactttaaatcacttctagataacttctaatacaatgaaaatgctgtgtcagtagttggtatactgcactgaggtgctttttttttttaagtagctccctgcacacacctttttttttttttttttttttttttttggagacagggtctcactctttcacccaggctggagttaagtggtgcaatcatagttcactgcagcctctacctcctggtttcaagtgattgatcctcccacctctgcctcccaagtagctaccacgcctggctaatattattttttctggagacggggtctcactatattgtccaggctgtatatctataactgtgtaggtaaaggatcgaaagaagaaaatctgagcctgggcacagtggttcatgcctataatcccagcactttgggaggtggaggcgggcagattgttttgagctcaggagttcgagaacagcctgggcaaccatctctaccaaaaaaaaaaaaaaaaaaaaaaaagacagcctggctcctgtctgttctgttttatatacaaagactggagaaatgcactaaaatgtcatctgtatccaaaagatacagctgctaatgtccttacacttggggggcctgctagccccacctcacaaagactcatttcatcctgtggtctagggagtgaaggttccaattcacactcactcgctatgaagcatatactctgtggcttttttttttttttttttttttttttctgttgccgggctggagtgcagtggctcactgcaacctctgcctcacgggctccagtgattttcctgcctcagcctccggagtagctgggactacaggtgcgtgcgtgccaccatgcccagctaatttttgtatttttagtagagacaagagtttcaccatgttggccaggctggtctcgatctcttgacctcatgatccacccacctcagcctcccaaagtgctggcattacagatgtgagccaccgcgcccggcctgttgcttatttttgactggctgtttcctgaaatcacttgtcaagctccaggaaatgttggagaaaggaggcccagttctgatcacacacacacagcctgggcctcactcctgagatcttcctgggctgctcctgtgggcccgagaagccttcttcccgctggagtgtacggttctgcagaccacgtagtggacgcacagccctggagtctgtgcgacccagcgtcttacttaaagtcagccctgggacctggctgggggtgtctaggtccccttctgcagctctactgttgtgcagcagggtgcgtgaacgcagtgaacgcgaacaacgcatgcaggcgcagtgggagcgcgaggagcgtgagcggctggagattgcccgagagaggctggccttccagcgccagcggctggagcgggagcgcatggagcgggaacggctggagcgcgaacgcatgcacgtggagcacgagcgcaggcgcgagcaggagcgcatccaccgtgagcgcgaggagctgaggcgccagcaggaactgcgctatgagcaggagcggcggcccgcggtgcggcggccctacgacctggaccggtaagcagatccatgctgcccttagcacgtggcgttcagaatcgtgttagggacctcacagtccagttagcttgagatttttttttttttttttg[132 bp omitted]cacctctcccggctaatttttttgtattttcagtagagacggggtttcactgtgttagccaggatggtctctatctcctgacctcgtgatccacctgcctcggcctcccaaaatgctgggattacagctgtgagccaccgcgaccggccagcttgagatctttcattcaaaggaagcataggccgggtgcgctagttcacgcctgtaatcctaacattttgggaggccagggtgggcggattgccttagctcaggagttgaagaccagcctggccaacatggcagaaccccgtctctactaaaatacaaaaaattggtcgtggtgacaggcgcctgtaatcccagctactggggaggttgaggcaggaaaatcgcgtgtacccaggaggcagaggttgcagtgagccaagatcgtgccactgcactccagcctgggcaatagagtgagactcggtctcaaaaaaaaaaaattagagacaggaggctggataaagtagtgctggttaactaaccaggttcaagggtggcacagacctcctgaggagggaagctcaggcacgtagagagcgccacacgtgccctactgcacctcctttaaggccctttcctttttttttttttttgagatagagtctcgctctgttgcccaggctggagtgcaatggcgcgatcgctgctcactgcaacctccacctcctgggttcaagcgattctcctgcctcagcctccctagtattcgagattacaggcacccaccaccacacccggctaatttttgttttttttagtagagatggggttttgccatgttggtcaggctgatctcaaactcctgacctcaggtgatccacccacctcagactcccaaagtgctgggattacaggcgtaagccaccacccccggccttgtcctggctttttaaatccattgtaatttgtttttgcttattctagaaataaagaattaaaaaaaaatttttttttgagacggagttttgctttcgttgcccaggctggagtgcaatggcgtgatctcagctcactgcagcttccgcctcctgggttcaagcaattctcctgcttcactctcccaagtagctaggattataggcatgtgctaccacacccggctaattttttgcatttttagtagataccgggtttcaccatgttggccaggctgtcaaactcctgacctcaggtgatccacccaccttggcctcccaaagtgctgggattacaggcatgagccactacgcccggcagtaagattaattttaatttctcaaacatactgaagaggaggtatgaacacaaaatgctgagcatggctgctgtgaggagtcaggtgtgtaattccagcagtgattgtgtcaggctttacacgtgcactgcaacctggcaaaaattgctgtttgttgtttctttctattgcatgggttgaagaggagcccaggtcatatatacaatgcaacttctataaagggccttgtaaactgttctaggatctattatgctttggtacgaaatccttctgatgacagttcattatggtcatctgtgtattgcagcagtacatggccagggctgctggcagggcaggaggtcagctttggggcgagagagatggcaggtgcacttgacagagcccctcggggtggaggctcacgtggtcttcctgagcggaggtggctgtgtagggctccagaagccatctgcaggcagcccataggactgactgcttaactaatggctccctctttggaaaaccgaggccgcttttcatcaggggaggtgggtgcatgggacaaaacaaaacaactgtgcagtcactggggtcaaatcagaccttgcctcctataggagagaacactcttggtgaaagtcatcctggttctgtgaagtgctaggggccagctcccacaaaggtgatagatacatttggggtgggggatccctctatctctgtctcatgtcccctcacaggcgagatgatgcctattggccggaagccaagcgggccgccctggatgagcgctaccattctgactttaaccgccaggaccgcttccacgactttgaccacagggaccgcggccgctaccccgaccactcggtggacaggtcagttgggcccctgctgggcgtgcgggttttctttttcctggctcattctgactgagaacaaggactcctgggctctctgaacccactccgttcatcagatgtatgctgagtcagacccgcaggtctcctgccttcagttagggaaattatgcttttcattgggggcctgatggtcctctctttgtgaacaagcctcttcttccccttacggtttgatttaaattgccttttcaggagagaaggttcaaggtcaatgatgggagaacgagaaggacaggtaagtctgaagctacagtggtagccacagaatttcccatagaatgggttcttttcccttcagcgtgccttcttcctgccctttctttgagcaagaggcaaaatgaggaaagagaaaagtaaagcactagaaaagtctaggtttgtggaatggaaatttgggattatttggggttagtcttggctgtcagtccaaacagttactctgaagctgtttttagccttgaccctggggttctgtgtgccacactcaccacacatgtgcaacagtgccagggaaccttgggatgtgacctggctctgctgggaagtgtctagtgagccgcacagctgactcagacaggtgcatctggggaggctgtggttgctgtgtctgtcctcgagtgcctgccctcttttgaaagtaaggacatccttcatcaccccagggcccagcttagccttggaaaacaactagatctgtggtctgtgctcattctcttcgggggctagcacattagaacaataagctccattttctccttccatcttacattgagactgagacttcccaggagagccttggacctctagtggctttccctataaacttgggggcagcacattgctgtgtggaagatgcctcctctctgaggactccactcatgagcccttcctcctcctgccagcattttctggactccaccataagcttcccgcttctgtcccccttggttccttaatgtggctgagcatagccaagtactcagctctgtctcgggatcctcaggaattccatcagcctcgtggggttcctttttccctgctcctggaggcaaattatatgcagcaaaacgtagaactagtcttgtggattttctttggtggaggagcatacaccaatggttccatgtaaaggctccagaatcagaactggcgtcacaccttggtgtcaccccttcctgctgagcctgtctccccaggagtgaaatgagggtaatattcctcctacaaagggtgcggtggtgggggtttacatgaggtgggcgcatctgtacaaacgtgtttatcattgccagctacttttttttttttttaatagagacgggatctcactatgttgcccaggccagttttgaactcctgagctcaagtgatcctcctacctcggcctcccaaagtgctaggattacagatgtgagccagcacacctggccaccagctgctttcatgaaggtgttagatatgctctcctaacagtggaacgcggtttgatcccttctcctcacatacacagtcataaatgagtcgtcagagttaccccaaagggaaatggtaacatctccctacagagaaaactagcacagaacttatgggcctcattgaacagttacgtgggttggttggacagaaaaatgttggttcaattttcaaatactaaggagagcttatttcaggagtcccttttcttactttgttgaggggaggcatcagagcacatgctgggaggataggccaggaagcaggcagtggtaacgtgggacatcgtgcacgtggtggagcatgccgccatctctcccttcaccctggcagagctctccgttgaacggggaggtgaacttggacatggacaacaaccagcctgtgtcaagggggtttccttaccaggactcctttctagtttcctttcacctacaatgtggtcatggggcaaaaaccccagagaccacatatgtattggtggaaagagaaaaaacaggactgtggagccaaagctacctcactagcttttgtgaaagtcaggctggaaagtgcttccagccacagaaataggctgtgggtgtaaatattaaccttggccatcaaataagtaggcatagagtgtgactcgccctctcttggtcttccctgaaacagcagggtcaagaactcctggtctgtgttagccacgtggcttacaaaaacaatgacacagaagagggaaaggtgggactagccaagtggaaggccagccgtttatctctcagtgtcctgtgtcttatatcctgagcagagcaaggtgcaagaccctggactgggcatccagcagaaacttccgagaaacttgactgtgaggaaggatgcttgcctagcaattggtcggatgaagggctccatttgatacttccttcactgtggaaggaagaaatttgtaaaaattatttccagaatatgcacacattaaaggtttataaacctgacctttctttagtagaagacagtaagagaatactgttggctctgggaactaaccatttgagctgtgggacccagggaatctctcttgtaagcatcatctttagtgggtgactcctggtggccctcccagctctggtggtgctgtggggacctgccttggagatgccttggtactagtaccttttttgtaccaggccatgagcctagggcacagggcctctggcctgcagatttcaggaaggcagctgtgttgtgtgaaccgatacagcctgccagcacttctgtcccgagtgactgtcgttgtcatcgttagcatgttgcctgaaaagccttggggtctgggcgctgacactgaagcttttttttcccttctggctctgtgatgtccagcattacccagaacgccatggaggaccagagcgccacggccgggactcccgcgatggctgggggggctatggctctgacaagaggatgagcgagggccgggggctgcctcctccccccaggtttgtgtcccacacccgacagtacctgaccccccccccgcccacaagggggcccgcaagtcgctgggatgtgggcacagggtgggaaacacagagggattcactctccagaagccgccacagttattagcacaagagccagagatgggggcaatccaaatcagagatgtctctctttcaaggggcagacgtgactggggggaccatggccgaagagaggatgaccggtcatggcagggcacggccgacgggggcatgatggacagggatcacaagaggtggcaaggtgaggagcagctctgggctgggaccaggatgtgctggggagtgatggaaagatggaggccgcgccttctctccttgggggagcacaggaggtgctctgctctcagtgctggaatgaggaatgaagagcactccagacaccgcctgctctctggtggtctggcccaggagttggacagtgggcgttcccgagttctctctgctgggaggaagctggacgtctatggtccctgtgcccaggtgtcttcctgggacccgctagttgtgggtacctgggggcctcaccaaagggagtggagtgggctaaatgtgccgtgggttccacgccgtgtgcgcaagttccctgtgtgaaagcacgtctgtcttccaggtggcgagagaagcatgtccggtcactccgggcctggccacatgatgaaccgaggaggaatgtcagggtaaggcatgctgggggcggcgccccttccccctgctttgcatattggcctaccttgctggaggcttaacaaccaagtccttccagctagtgcccctccccccaagggtgacgtgaggccaggcatggggtactgtggaggctgctgccactcaggaggggagggcattaggaaggggccctgcctgcaggcaacactcagggaagctgtgcaggctgggatgggccggggagcaggaggacttcgcagtcaaaccaatgtgaatttgttcctaggcgcggcagctttgccccaggcggggcctcccggggccaccccatcccacacggtggcatgcagggcgggtttggaggccagagccgggggagcaggcccagcgatgcccgcttcactcgccgctactgagtacttggaatcctgtgtcctgtctcgtggcaacaaggctatgttctgttaggagttaccttaaactgtgtaaaaatatttttttttaatctgctgccatattgtagctcaatacaatgtgaatttgtttttcgttttggggttttttttttttgtaataaatgtgtttccgttcacataccctttatttaaagtgtcatttctttatttctgcctctttaaatgaaacgaaattagacttttagttgtattgatatacactgattgttcctttttttaattattattattatttttttttttttttgagatggagtctcgctccgccacccaggcctgagagtgcagtggcgcgatcttggctcactgcagcctccacctccagggttcaagtgattcttctgcctcagcctcccgagtagctgggactacaggcgcctgccaccacacccggctaatttttatatttttagtagagacggggtttcgccatattcgtcaggctggtcttgaactcctgacctcatgatctgcccgccttggcctcccaaagtggtaggattacaggcgtgaaccaccacgccaggccgactctgtttatttttaaatatgtgtgaaacctctgggaaggcatccgggtgtggaagaggctttccagtgagacagtgattggttttcgcataatgggcctgtgcggtgcaggttttgcctgacttctcaagtcaccgagttctcctttaatgttagcacagaccgggctgctttgctcttgggtactgggtggcatccctgtcagggtgtgggggtctcaaaccctgttgatggacactggcggatgcttcccctgcggatcacactcgaaccaagcctgcgaagatttccagctgccactctccacactgacttgccaaagcccaggcaccatcatcatgtggatgcttccgcattacctttttactcagaggacaaactattttcacggcagagtcgggtggaagcagtgaaggctgaaggtcatcagcagcatctcaggcccgaggcgtgcttgtgcacaggctcagccccctcgtgccaggatggggctctgaccagcccagggctggcctctgtgtcagccggaagggacgagcccaacgccaaccctccacacaccagcagcaagctggagccacggcatctgggatccagcacctgtcctaatccaggaagccaggccagacttgggacatacctcaaactgtgaagcaagtgcctcccccattttgtaagcctcactgtagtggagagcggggaggaagcagtgtccagcagagaggaagacggcggagccccagtaacgctctagggtcccttcagctgcaaaggacagatgaccccaccaataccagtggtggcttagatggtaaaggggggccctttcctgccttaacgggaagtttgtaggtaggcagttcccggggctcactgcagcccacctcaggctctgtttctctgaggattttgggactctcatggatgatggatggctgaaacagctccaaaaatcctatccacccacagtgtgggcatcatcggggctatccagcaggagaaggaagggcaggaacggggacttgaactcacaggcctcttggcaaacttacccctgaggctccttagccagaactcggtcctgtgctcgcctttcttgcaacccgtccctggcgaagacggaatgtttctcttcagaagggatgtgacatccgggaaggaacccagtggtaacccccagcaaccacgttctcagccttcccctcgtacctttttttttttttttaaattcaagctgttcacattctctgtactttttttttttttttgagacagagtctccctctgtctcccaggctggagagtgcagtggtgcgatctcagctcactgcagcctctctctcctgggttcaaacaattctgctacctcagcctcctgagtagctgggactacaggcgcccaccaccatgcccagctaatttttgcatttttagtagagacgggttttcaccacattgggcaggctggtctcaagctcctgacctcaggtgatctgcctgccttgacctcccaaagtgctgggattacaggtgtgagccactgcactcggccccattttttttttgagccatatgcagttgtgcatgccagtaatcaatcccagctacttgggaggccaaggcagaaagattgcttaaggccaggagttaaagtccagcctggacagtataccaagaccccatttctttgggttttagggggtattttttgaaataagaaatgacgggctgggtgcggtggctccggcctgtaatcccagcactttgggaggccaaggtgggtggatcacctgaggtcaggattttgagaccagtctggccaacatggtgaaacactggctctactaaaaatacaaaaattagctgggtgtggtggtgcacgcctctagtcccagctactcaggaggctgaggcaggataatcattttaacccaggaggtggaggttgcagagccaagatcgcaccatcacacactgcagcctgggcaacagagcaagacttcgtctcaaaaaaaaaaaaaagaaatgaaagaaagaaatgacagattccactagcagagagagatgaggtctgtgaacatctggggcatgtccctacagactctttttttttttttttttttttttttttttttttttgaggcggagtctcgctctgttgcccaggctggagtgcagtggcgcgatctcagctcactgcaagctccgcctcccaggttcacgccattctcctgcctcagcttcccaagtagctgggactacaggcacccgccaccatgcccagctaaatttttgtatttttagtagagatggggttt[132 bp omitted]tcatacattcctcccaggtgtcattatcagccccagttaacagaagagaaaactgagggcacagattggacactgtacctgtaagaaccaaatgcccacagcaatgattctaaaccctaactgcatcacctacatggacctacgaatcagaatctatggcagttatggagttctctagggccgctgtaacaaattgctacaagctttttgtgtgtgagagacagtctcctgtcacccaggttggagtgcagtggtgcaatcatagctcactgcagtctccatttcctgggctcaagcgatcctcccacctcagcctgcccagtagctgggactacaggtgggtgacaccacacctggctaatttttgtatcttttgtagagatggggtttcatcatgcccaggctggtcttgaattcctgggctcaagcagtccgcctgccttggcctcccaatgtgctaggattccaggcacgaggcaacgcaggcagcccagtctcctaggcaggagagatgcctcggagtgcttctccccggccacagtcttgagtcatttgcatgggatgttctacttctaatgcccaggcagcacccttgctgtcctgctacacagggaaggacggggattcagccctgctgtcagccaggcactgagctgtacctgctcttccccaccatcctcaatataaccccgggaggctgtacaaccccattttgcagacaggaaaactgatgcctagcagggtgaactgacgagtgaggacaatcaactggcagtggaaaagatccaagcttcgaaccacccattcattcaactcccatttccacagcccgcctctcaagcagggtccccggcactgaccagatgtgttcacacaacagacccaatcagtgcctgccctcaaggtgggcacacgtgcatgtggtgagcttatgaagtgcagcttaggccaggcgcagtagctcacacctgtaatcccagcacgttgggaggccaaggcaggcggatcacaaggtcaggagttcgagaccaccctggccaatatggtgaaaccccgcttctactaaaaatagaaaaaattagccaggcacagtggtgggcacctgtaatcccagctactcaggaggctgaggcaggagaatcgcttgaacccgggaagcggaggttgcagtgagccgagatcatgccactgcacgccggcctgggcaacagagcaaaactccatctcgaaaaaataaaaaaggccaggtgcggtagctcacacctgtaatcccagcacttcaggaggctgaggcaggcagatcacttgaggtcaggaggttgagaccagcctgaccaacatggtaaaaccccatctctactaaaaatacaaaaattagccaggagtggtggcccgcgcctgtaatcccagatactcaggaggctgaggcaggagaatcgcttgaacccaggaggtggaggttgcagtaagccaagatcacgccattgcactccagcctgggggagaagcgcaagactccatctcaataaaaggaagtgcagcttcatggtacaggttgccctggccacagaaggaatggaggcgtttcctggctgggggaacacactgaaggctctgaggccaacaggagcaaacttgtgggagaaactgccagaaggctgtgggggaagaggggaatggccacaggggacagcaccatgtatttttaacactctgggagtgaaaagtctctggccatgggctacttggtggtctcttgaggttgttctatacagtaagaggagtcttttccctccaaatctggtccccatccttacacgtgtctccaggaagcagctgaagcccaggtcccagagggatagaccttgcccttagtttcagcacggcaacgtacatgagtgtccacttcggcctgcacctcagccagggaaacgtcttcattgttggccgtgcctctagtggcagccagcccaacaatgctaggctctccccaacagcaggccttcactggcaagactctctgaaccaagatggaccattgctttgtgggtaagtggagtagacaaaccagtcctcatacatccatccaccagcgcattcacccacccacccatccatccacccatctacccacccacccatccatctatccacccacctacctacccacccacccatccatccacccacctacccacccacccatccatccatccttcatctaatccattcatctgtctacctacctaaccacccacccaaccacccatccgtccatccacctacccacctacccatccatctatccacccacccacccatccacccactcgtctacccaccacccatccatccacccgtctacccaccacccatccatcctccatctaacccatgcatcctccatctaacccatgcatacctatccatccatccacccaatcatccaaccacccacccatccatccatcctccatctaacccatgcatcctccatctaacccatgcatacctatccatccatccacccaatcatccaaccacccacccatccatccatccattcatccatccatccacatacccatccattcatcatccatccactcacccaccccatccatctaccccattcatccacctatctatccatccattcatccacccacccagtcatccatccatccatccacccacccacctatccacccaatccacctacccacccatctaccccatcatccatctacgcactcacccatgaatgcatgcatctacccatctaaccactcatcccatccactcattaatccatcaagccattgactatactcatccattaattcatccatgcttactaatcatcatctttttattatttttttcttttttttttttttcgagacagagtctcacactgtcgcccaggctggagtgcagtggcacgatctcggctcactgcaacctccacctcctgggttcatgacattctcccgccccagcctcccgagtagctgggactacaggtgcctgccaccacgcctggctaattttatgtatttttagtagagacggg[136 bp omitted]agatgaagttttactctgtcacccaggctggagtacagtggcacaatctcggctcactgcaacctctgcctcaagtgattctcctgcttcagcctccccagtagctgggactacaggcgtgtgccatcacgcccggctaatttttgtattttttttagtagagacggggttctgccatgttggccaggctggtctggaactcctgacctcaggtgatccacccatctcggcctctcaaagtgctgggattacaggcatgagccactgcgcccagcccatgcttactaatcatcttccataccccaggctctatgctggggtttgggaacacgcctactattaacatatggtcccttccctcagggagcctgcatcctgttgagctaagtcacacaaacgcaaactgtggtgcccaaggagaagaaaaggtgctgaactgtgcctcagaacaggggcatggtgaccctgcctgtaggagaggagtctgccaggatgaggacgggaggggtcttactctcctgcaaggtgagatgaggcagggtgtgcagggacctggtgcccctggaatgcagagatggtgtgggggttgaggcctggaagttctctcccagcctcagcctcagcctcagcctcaaggaaaccacccctccccttggcctgcctcttccttcttccagagaccacccctggggatgaaggacaccagccctccggtggcatcagtgccaccagaggccagcagaggggtcagagcacagggcttccactgttgcctctgccatcgcctgcctccaggtaagttcttgcagttttctgagcctccgtttgctgacctgtaaaatgaggctactgagctgctcttaggatttcgggatgaaggcgccatcacagaactgcattccctctccctccagctccaaaaactgaattccgccaaggcgtagagcagctcttaagcccaagttcactgggatcactactgaaagtgacaggaggcagccaagtgtctaggcagatagggacaggtcccagtgaaaccccaccttcaagccaaaaatagcccaaaagctgaaagaccagactgctggtcctggaggaaacccaccacccagagtgagaacttctgttcctgtttgcccaccctttcctggttgattctttctgaacaatgccttttaaccagtcgaatgttgccctttctgatactatctatggcctgcccctcccctattctgagcctataaaatcctacatgtctactgacagcaaactcatttccaggaccatgttagatgggaagacgcgtggctgtcagctgcttcggttgtcaccttgtcctttcagatttaattaaaactggctgctcagcactcagcccacacggggagaagccaggttgccgctggcccgtatggcaccggatggatggggccaaaggtgggctgaacatgctctgggctggtaccatggagaccctgagcccagcatccccccagtcagggttggggaccctcagggctcacgttgctcctggttaccttggctttattattaagagacagggtctcactgtgtcacccaggctggagtgcggtggtggagtcatggctcactgcagactcaatgtcccagtgatcctcctgcctcagccggggctacaggcacatgccaccgcacccagctaatcacctccatttctgctgcacccaccattccttgggatggcgagttagcactcactccaggccagggccgggcaaagtgcgctcaaggctggagcgggaccacgggcagctgtggtgacagctgaaaggaagggcagccactcggtgtcccccacgccccagccccagctggcctccgcctatggactccccctgctctctcttctagctctgcccagcccacatcgtgatgggctagctttccctggactccgttcctagcccgtcctgcttccagctatcgagtgaccccagctgtcaaatggcactgtgccacatgccagccttgccttgctctgtggtcttggctgtgggtgtggtcaggtgtttccccagccccttcccgccttcccaaagtcacccctagacctgcctcagccacctctgctttctggagctccacttccatggccccccaactcccctgaccccaggcatgttcttgcacacaggtgccagtggatgggtgaggacgaactcatgggataaagcctgtgaccccagggaagaactaagccacattcgtggagctgcaggacccggccgcctggatggaggggaggggccagaaagcagctgctcactggcctcgtccagtccttcccctctaacagtgacggtaacaggtgtgaggctgcagaggcctcctggagcggacggacgccctctggcccagccatggcatcacagcaccgagtgcaaacccctcctgtcctcacaggctggggctggggctggggctgggtgcctgggtgcgaggcgactagaaattctgcatcccctgcgagggtttgtggtgaacagcctgggctccggacaggctgggcagacagaactgtctgtctgtgcaagtttcttcgtctgtaaaatgggcctgcagtctgctccttcctgggccttcgggaaggacttggtggacagtgtcaggggacagtgagtgcgtgggtgctccggcgagcaccggcttcctcctgcagcactgagggtcagtgatgctcccctgccctgctcatccctccctcaccctagacctgcccccaccactgctaaggcccagtaaggacaggggcatatcagatgtgggggacctgtcccgggaccacgctcctggggggaatggggtgggcaggccctgtggactccccttctaccagactaggccgctgctcccagccacacccctcctacgccctgctcaggccagtggcttctcctctctgagtgggacagtgggggagatgccccggcctctagtctctgctcctctcctctgtaacagctgtcccctcctaagctcagttccctataccaagcaacataaacccctgaactcatgggaacggggaccctgtcccagctcggtgagcatcacctgtctgctccctgctcccagggcagcatcctacggaggcctctggccccacccaagctccccaccacccccatgtgtctggagccaccagactggtttctgggcacaggcctcttgccatcacccaaccccgtggatcgccctctgtggctgggtgctgggagcctcccagggctcatgcctgatgcgggggaaccatgcaggctgccaggtagcctggccagtgtgcggcaggggtgtcagggaaggcgtcccaggggagaggcaatgtccgggagaccctctgaatggcaacaaacacctggatttccttcaatgaccaggattcccctgctagggttgtcgggagagggtggaatgagggtggagtccggccaaggaagggccgggacaggactgcggacaggagctgaggagggcaggaaccagtggccctgggggctcctgccctgtgtcccgcagggaagcagaccccacttctatccactctggctcttccactgtcctaccctggtctcagccctccaaaaccaagaccctccacaacccaggcttggccaaagcactttcctggccccagagcacagcctctggagcaccgggagcagccgctctgacctctgactccccgcaccagagcagacggcaaaggggagtgctatggcctgtggtcaaggtcaagccctgacaagccatcaggagccagaagcccaggcctcggtgctctgggcaccaccaggccaaccctgtgctccctggggccagcacacgggtcagggaacacttctgaagtcctttattgggccggcaaggccgggagctgccctcggagtggggtcccagtccggagtcttcaggtcagtggcagccctgcccgttctggccggggcaggcggcccctgctgactcgctacttggtgcgcgccttcacatactcccagccctccttggagtactcgcgggccttggagggggccaccgacagagctgacatcaccgtcatgatgcctgtgggaaagggacggccactggtgatactcccctcccagcctcacccagcctccaacccctgggaaactctagagtttgttttgggcggtggggggtgggtggggggcggggatggagtctcactctgtctcccaggctggagtgcagtagtgcaatctcggctcactgcaaccttcgcctcctgggttcaagcgattctcttgcctcagcctcccaagtagctgggactacaagtgcgccaccataccaggctaatttttgtattttatttttttgagatggagtctcgccctgtcgcccaggctggagtgcagtggtgcaacctcggctcactgcaacctctgcctcctgggttcaagcaattctcctgcttcagcctctcaagcagcagctgggattacaggtgtgcaccaccacgcacggttaatttttgtatttttagtagagatggggtttcaccatg[136 bp omitted]aggaaggaggatggacagaaaggaatggccaggaagtggggagaggggctagactggggtgtctccctccaagcaaagaaactgggtgccttacctgcattccaggagtcacggatgggaaagtaaatctttggaggggctgggagctgggaaaaagagatgggcagaaagaactggtgaaaaggctcagcagcccatccccagaggcggagggaggaggacaggccggagaatcaggtcagcatcaatatggaggacaacatcgtgcagggctggagggacctcccagagctgaccacccgccaaaccctggcctcgttcccggcccgtagtacctggggtatctgcaggcctgtctgctgacacacgtactggctgaactggtacatggcgggggggaccacctccccagccttctgtagggctgcctggctcttgtcgctgggccccagcagctcctggtcgtacaccaggtagacggcgcccccagccacacttcccttgatgaggaacctgcgggcagggacgggaggagcagaagctcagcggacactgacagccaccctcaggggccaaggcccacggggagagtgagaccctcctgagggctcaccgtccacagggtgacactctgtagtgcagcaccgtcgacccagacccctattatatacagcactcgttttacaacgtgcaaggcagggcggctggacgccacttgaactgatgaactgaaacccagagggggagagtgggtcactcaaagtcccacagtgagcaggggcagtgaagacgtaagatcttgaccttctagaagccttccagccctggagaaaccaagtgtccctgggcgcctcctgcccgctgtcactcgcagctccgagcacgcattcacttctcatccacgccagcggcaggattcaccggcattcccacctcacagagaagacaactgaggctcggaggcggaggctgacaccgcgaactgaacgccaagggctcgctgggaagcaggagggaggggattggcgacctcgggaagccccgcccctctgaagcctcagtttccctatctggcccataggcggggaacgaaggggaagtgactctaagggaagcgaagagcagatcgggaccagactggagacagggatgcccacaaaaatggactttttcggggactcgggtcccctccggcgcccccacgcacctcatcagcgaccacacccgggccaccatggtcgctcggatccacgcgcaaggacactcggctcgcccgccgcttcctgtcgcggcgccgcagaggcctctggaaggtgtagtctttcttgcccgacgcaaggtcctctgggagtcgtggtgtcttgcggctctgagactccagagaagggctgcggtctcgcagcggagggccgctgggaaatggacgctttaaggcccgggccgccgcaaggctgtctgggaaatgtagtcagcacggcgctgtttgcacctggccgcggagcctcctgggaaatgtagttcggcccggccctggcaccgtgaggggaaagaggcgtcaggtgcctggctgaagcctgaaggtgacccgaaaacaagtcagagcccgagagatccacccgcgcccgcgcgggggaccaagggcccggatttaagaagagtgtgcctacaaggcggttgtcacggcaacgagagggcgggattgttcgagcgctgcggccccctcacgtgatcgattcggaggcggggcgtccgcccagtgggcggggccgggcccctgctgggaggcgaagaccaggcgggcactgttgcccggcgacgctccggcgctgggtccccgaggcccggcccctccccgggaggaggtgggcttcgagtcacgtgacccgtgccctacgggagggggtgcggtcggggacccggcaggaggcggccgagaagagaggaccgtgggggcgttcgcgtggctcccagcccgggaccccacccccgctggacagtgggggaaactgaggcctgagcgggtgagtgcacggtttaggggtgcgcagagggtcacacgcccgctttgttcagaggggaagctaaggcccgccgaggtcaagaaggggccgatgcgttctgcagggcttccccccatttctcccgcatttcggccgggctgcttcaaccgttcatctgcccatccatccatctgtcccccacccgtctatccatctggccatccacccatctatccttccatctatccatccacacttccgttcatccatctgtccgcccatccattcatccatctgctccccccatccttccactcatccatctgtccacccatccatctatttatctggccacccactcatctatccgtccatccatccatccatccatccatccatccatgcatccgtccgtccatccatccatccatccatccatccatttatgtgttcccatttatccattcatacatccatccactcatccatctatccacccatacatctctccgtccatcatccatccatccacccatccatctattcatctggccatccacccatccatccttctatctatgcatccatacatgcatctgtccatctatccattcatccatccacccatccgtccacccgtcagtccatctggtcccacttccccctgccgggctgctgcagtcagtgtagagctgggggtggaaagagggatgagcagaggagcttcatgggctgtccctggaaggggaaaaggtggaagctcgtttcttgctgtgggcatgcctggtgtgtctgggaaaggtgaggagttcattattttgagaactgaacgattcatagatggggccgtgggagagaaggatagacaggtagtcaggggctatacctgcagggcctcatggggtgcagtgaggagcctggtttccatcagttgcagtggggacccctgagagggtttggagcaggaagggccatggccatgttgcttttgacacagacgcctttggctgcattgacagaagaggcagggagagaatgagtatggacatggggaagccagtgtggaggtgggggagaccaaatcggagatggaagggaggccaaaggaaagatgggggtggtcaggcccggggtagggtctaggagggaggtgacaatctgggagtcctggagagagagaggaagggacagctggggagagactggagagggagaactgataagatctgaaaaccatgagctcgtgggggtgaaaggatagaaggaggtgaggacaatacctgggtctcccatttagggacaggggatagtggggctatttctgtgatggtgagctgggaagagaagcaggtatggggtgacatgctgagcctggattgggtcctgctggttctaaggggcctggaggttgtcaggaggagacacccagaagacagcagaggcaaagaacctagggctggacctacagatgggagatttagggactcctcaatgatccgctccatctggtctgtctcagcttcctggttctggaagtccccttccccttgtcccattgacttttttttttttttttttttttttttagacagagtctcactctgttgcccaggctggaatgcagtggggcgatctcagctcactgcaatctccaccccgctgggttcaagcaattctcctgcctcagcaggagaccccatctctacaaaaaatacgatgattagttgggcgtgctggtgcacccacttgtagtcctagctgctccattggctgggatcacaggcatgtgccagcatgcccagctaatttagtatttttagtagagactgggtttctccatgttggtcaggctggtctcgaactcccagcctcaagtgatccgcccacctcggcctcccaaaatgctgggattacaaagtgtaatcccagcctgtgcaacaagagtgaaactcagtctcaaaaaaaaaaaaaaaaaaaaagaacctggactgtttctctctttcaccttctccctggaattagtgaatcagctcccatagctgaaatcataaatcatatcttcatctggatgacgcaggcacctctgtctccaacccagccccatgtgtcaaatgccttctgggtgtctccagagagcgagctgtctcttggcttcctcacctctcgcctcccacgtgcctcatatcactccatgatcaatctggtacctattgagcacctactgtgtacctggcacagttttgggccctgaagacccaatagggaacaaagtagaagatttccatttccttcctgcccttatggagctgatggtctacagggagagaaggatggtggaacgagtaacaaatggtccttgggctgggcacggtggttcacacctgtaatcccagcactttgggaggctgaggcgggaggatcacttgagcccaggagttcaaaatcagcctgggcagcatagtgagaccccatccctacaaaaaatacgatgattagttgggtgtgctggtgcgcccacctgtagtcccagctgctccattggctgaggcaagaggattgcttgagcccaagaggtccaggctgcagtgagctatggtcgcaccactgcactccagcctgagcaacagagtgagactctgcctcaaaaataaaaaaaaataaaaataaaaaaataaataataaaaaaaggaggccctcacttgaaggaggtcactgttctttttttgtttgtttgtttgtttttgatacggagtttcgctcttgttgcctaggctggagtgcaatggcaaatctcggcacactacaacttctgcctcccaggttcaagcgattctcctgcctcagcctcccaaatatctggattacaggcatgtgcgtgcctcagccccctgagtagctgggattacaggcgcctgccaccgcgcccggctaatttttgtatttttaatagagatggggtttcaccatgttggccaggctggtctcgaactcctgatctcaagtgatttgcccgcctcagcctcccaaagtgctgggattccaggcatgagccaccacatccagctgaaggaggtcacttttgcactgagacttgaaagaagtgagagagcaagccattgggttatatccgggaacagcattctaggcagtaggaacagcccacgagaaggccctgaggcaggatagtgactggctggtttcaaggaacagcgaagggtctgttttagtggagcggagtgagcaaggaggacaggtccacacagggcgtttgtagccaccaaggagtctggtttttattctaactggaacaggaaggattttcagtccaggagaggcaaggtgtgcagatggagagggctgagaagggtggagggggagggtgcaggtgcggtggttcatggagccgcggtggttcatggagccaccgtggtggcctggacaggtggtggctgtggaggtggataggaaggcgtggatccaaggcggtggcatcaccaaacacccaccaaacacgggtggctgtgggccaggcctgtgccggccacctctgtcccctgtccctctgcaggcccacacaggaccatgaaggtgcttctcctcacagggctgggggccctgttcttcgcctattattgggatgacaacttcgacccaggtgagcacctggggttgagggagggagaaaccgggccagctgtcctgtcctccgcccagagtgaccaccccggctatggccagccagcctccagggagcgcgagtgctgctgacaggggccaacgctggtgttggtgaggagctggcctatcactacgcgcgtctgggctcccacctggtgctcactgcccacactgaggctctcctgcagaaggtgagccaccccatgtctagatgaatggtgggggtgctcatggggggtgggaagagagcctgggtttaatccctgcaatgatccaggcttcccgtgtgaccttgggcaagtcgcctaacctctctgagcctctcagtttcctcatttgcaaaacggggacaataaaaccactttctggccaggcacggtggctcacgcttgtagtcagcactttgggaggccgaggaaagtggatcacctgaggtcaggagttcaagaccagcctggccaacatggcgaaacctggtctctactaagaagacaaaaattaggccaggcatggtggctcatgcctgtaatcctagcactttgggaggccaaggcggatggatcacttgaggtcaggagttcaaaaccagcctggccaacatggtgaaaccctgtctctactaaaaatacaaaaaataaaaataaaataaataaataaaaaattagccggcgtggtgtcaggcacctgtaatcccagctactggggaggctgaggcgggagaattgctggaacccgggaggtggaggttgcagtgagctgagatcgcgccactgcactccagcctgggtgacagagcgatactccatctcaaaaaaaagaaaaaaaaaaattagggcatggtggcgcgagcatgtagtcccagctacatgggaggctgagtcaggagaatcacttgaaccccggaggcagaggttgcagtgagccgagatcgcactactgcactccagcctgggcaacaaagtgagactctgtctcaaacaaacaaacaaaaaaacccaccttctcatgggttaggatgttgtgccaatgcagtgagacggtgactagaagatgcagtgtttcttaacaaatgagagtattgagtgtccaggcctgtgctgatagccagggttcttaaactcgaagggaaggatgggcacttcttagcaacaagcagtccattgctacttcaaggaagggtatggctcttgggcacaaacctttcaatatttcaagagaagctagcaatcaggaaattgtagatgaaatgtcctgttttagatgttggtgattgactaaccaccaaattggccagcattctggcccgcgggcctccactttgcgcccctcaagcagtggtaaatttttgggaatgatgttgaatgggtcccgaggctcagagtaggggggggttttcaggcgggggcctccctatggccagcaggtgcggtggagggggaagcgctgctgtagaggagaggcccacgggcagctctggccccccccaggtggtagggaactgccggaagctgggcgcccccaaggtcttctacatcgcggcggacatggcctcccctgaggcgcccgagagcgtggtgcagtttgcgctggacaagctgggtgaggggctgggcctgaagcctggagtccgggaccgtggcctaggccttagggacaggaccagaattgggctgtgggtgtggccacagtaacaggtgtctcagggcggagacaaatggggactgggggcgtgggcggggtggagtctcattgcgtctgggggaagagctctgaacggggcctcgttgaatgggaaccaaaccttgctagatccagggtgtaaggccaaggctgggtgtctttgatcgtagtgggagttacctggggcggagctcgctggaccagcgctctgggtggagctaagctcgggggcggggtttgatcgtttccttggggaggggcctccggggctgaccggcgtttctgggccaggcgggctggactacctcgtgctgaaccacatcggcggcgccccggccggcacgcgagcccgcagcccccaggcaactcgctggctcatgcaggtgctccgctcctccgcggccccggcccgcccctctatctcagggaccggtggtccgttcccttcgcggtccgggttctgccttctccagggagggctctccacccgtcccgccccagccacgcccctcctagcccaagcccctgctccggccttgaccccgccctcggacccgccttccgggtttctggccccgtctctgacccggccctggccccgccctctgggtttctggccccgccctgcccctgggctccgcctctgccggtgactcgcgagtgccgcctgcaggtaaactttgtgagctacgtgcaactgacgtcgcgggcgctgcccagcctgacggacagcaagggctccctggtggtggtgtcctcgctgctcggtgcgtgcacccggccccggctctgcgggacggggagtggggagctcgatgcgggtgagcctggagggtctgggcaggcttcccggacgagggggagccactcagccgctgccgtccgcgcccccaggccgcgtgcccacgtcgttctccactccctactcggcggccaagtttgcgctggacggcttcttcggctccctgcggcgggagctggacgtgcaggacgtgaacgtggccatcaccatgtgcgtcctgggcctccgagatcgcgcctccgccgccgaggcagtcaggtgaggcccggacaagctgggggctgggctgggggccatggcccagccccagccgcagtccccaccgtgccctcctgtccccaggggagtcacgagggtcaaggcggccccggggcccaaggcagccctggccgtgatccgcggcggcgccacgcgcgcggccggcgtcttctacccgtggcgtttccgcctgctgtgcttgctccggcgctggctaccgcgcccgcgggcctggtttatccgccaggagctcaacgtcacggccgcggcagcctgagcaccggggggtgcccctccagtcccagacggcaatgttcctccctccaactgtccctggagccagaacactcacagagacacccctgagagggtggccacagcccaagatgaagtcatcaagacagaaaagcaaaaccgagaaaaacgacgggcacctggaaccagtcacggcttgggaggtgcaggtgccccgtgttaggcgcctttgtcggggacttgcaaggcctcacctgtttggccatgattgatgacgtgactgcttccattttgcagatgaggaaactaaggctcagagaggccacgccacccttgagccacccatggacccctctccatctcctgcctgcgcctttaagtccctgatttattctttccattcattccatctgggaggaacccccccaactcctgccagcttcccctagctggggtctctggtactcttcacacctgcaggggcgtctacactgttcgtctacctggtggcagggtctgagcgggaggaggagggaaagagtgtgttctgagctggacccagcctcttgttcgagaataaaaactcttcttctcttgcatatctgttgttcaaattccttggtaattccaatttgctagcagccagcgggcagcgggagggggtgtgtgtatcaggggccttgactctcaatcccatttcacaggtggggaaatggaggctgagagggccaggagcagtggctcacgcctataatcccagcactttgagaggtcaaggtgggcagatcacttgaggtcaggagtttgagaccagcctggccaacatggtgaaaccctgtctttatttatttatttattagacggagtctcactctatcgcccaggctggagtgcagtggtgcgatctaggctcactgcaacctctgcctccggggttcaagcgattcttgtgcctcagcctcccaaatagttcagattacaggtgtgggtcacaacgcctgactttttgtatttttagtagagacggggttttaccatgtcggccaggctggtctcgaactcctagccttaggtgatccccctgtctcggcctctcaaagtgctgggattacaggtgtcagccactgcacccggccacaaacaaatattttaattaaaaaattagccaggcgtggtggcatgtgcctgtggtcccagctaaggaggctaaggcaggaggatcacttgagccctggaagtcaaggctacaataagctatgattacagcagtgcactctagcctgggcgacagagcaagaccctgtctggaaaaaacatgaaagcgctaaccctaattagagcagccctaaattgagactctcttcttgtatattagtagcattaaaggagaaaaactggaaacttgtgtgtttctgccacccgattcagttatttagcgtcccgtccctacaccacctaaattacatcagatgtccgcaaggggcactattacacgttgctgtattcagacctagtctag[131 bp omitted]ctgcctcagcctcctgcgtagctgggattacaggagcatgccaccacgcctggctatttatttatttatttatttatttatttatttattgagacggagtcttgctctgtcgcccaggctggagtgcagtggcacgatctcggctcactgcaagctctgcctcctgggttcacgccattctcctgcctc[134 bp omitted]tcccaaagtgctgagattacaggcgtgagccaccgcgcccggcctaatgggcgttttaacagttcatacagtttggtattattattcccgctctacaagtgaagaaattctgagaggtgatgtcgtcgatgcagggtcggcccgaaataggcggagttgggattcgaactcatttcacaggcagagggaggagagcagccatagccacctccactggttccgactccagctcccgggctcgcaggagtaaacgcgcatgctcagggagctcggtcgcgcatgctcagcgcaacggcggggaagactccagccgccagggggagcgcgtgccgttcttgcctctctggcctgcgcctcctgagccgagtagatatcccggagttccgcgcggcgccagcccttccgccacggccgtctctggagagcagcaggtaagtggtttcccgcactgccggtatccgccgccatccggactcccgggtcctctgtgcaggttggaggatggttggttgtggcgagcgaggctgaaggagccgggacgcggggctctgggcctcgggaactgagccggtactcacctccgccccttctccccgtcgctgtccgcagccatggccctacgctaccctatggccgtgggcctcaacaagggccacaaagtgaccaagaacgtgagcaagcccaggcacagccgacgccgcggggtgagtgcgggtgccgcgcggaggttgtcgggggtttcttggagggcggagggcatggcttgggcaaaggctctcgacctgaaagaacgcgcgttcgggcgcagaactaaggggggcttgaatggaagagatggggtgggggagtgggacttcctgcctggtgctcgaaggcgggcacccatctgggtttttcccaaccgtgcaatccacgctggggcagagggagcaccttgagagcggcgcggggcagcgggtttggggttctgacgcaggagtaggagttcgctcatggagctggcccgaggttgcggtgtgtgaggttgagggatttcaggtgtgtcagtgtattgggcgcctttattaagcgggcagcgggtttggggttctgacgcaggagtaaggagttcgctcatggagctggcccgaggttgcggtgtgtgaggttgagggatttcaggtgtgtcagtgtattgggcgcctttattcagcaggcagcccagactccaggtgcgtcctgccagtgttgcggagactgggacttagggaggatgggagctgctccgggcgcggcgaaaagcgctaggcgttaataccttggttctcacagctacccacagaggggaggaagtagccagggaaatcgcggcagcgcgagagaagctgcttaactagaatgcagggatccccctaccctgacggccgcccctttcccccctagcgtctgaccaaacacaccaagttcgtgcgggacatgattcgggaggtgtgtggctttgccccgtacgagcggcgcgccatggagttactgaaggtctccaaggacaaacgggccctcaaatttatcaagaaaagggtaggtgggcgctgccggccgaggggcggggtgggatgggagtcagggccgggctgacggcggcctcgtccctggcaggtggggacgcacatccgcgccaagaggaagcgggaggagctgagcaacgtactggccgccatgaggaaagctgctgccaagaaagactgagcccctcccctgccctctccctgaaataaagaacagcttgacagaagccctggctctcctgctgtccgtgggtgggtgtgggtgtgtcgggggcccgcagtcccctgtctggtgcccgctctgagccacaccctctccgggtgctgcctggtcgtgaatcaaaagccgtggcccgcccacccttcccggggcagcaggtgaggaagccgccgtactgcaaatgactttaatcattaaatagcttctatgccacactctgattaagccgactgaggtccctgggatctgggtcactggaccgagctgctcgctcggtggctccactgccaggtccgggcgcgctccccacagcgctcagttctggcccagacagggcctgacatccgccgcctgcagtcccggggtggccgtcaccgttccacggccagcgcctctgcctgctcgtccgggaaggcgatgtcgaagatctcccggtagtgttccacgaagtgcacctccaggccctcggtgatgaaggctgccaggtcgtagaagtccttcttgttctcggctggcaggacgatgcacgtcacccctgcgcgcttggcctgggggcagagtcagggtcagccctgcctgggcctgtgggagggcagcaggtgtgctaacctccaggaacgaaagggcttcctggggaccggcgatacacagtgatgccgggttctaagcagtaagtcccaaaacccaccagggtccccgtctcccacggggaaacaggctcaaggcaaaaccactggccttggctccaacagcctgagagcaggagccagggcctccccacccccttatctaggaagtctggccgtgcggtgggagcagtctcagggctctggatgagccacacacccacggcctcacatccagaggtcaggcagtgtctggggcctgaacagggttcctgtgagcatctgcatctctgcccccaggccctgcgtcacccccctcacctccggaggctacacatatctggagtagatgccaggcacagccccaccacagccccttgaaaggacagcagttcccactgtcaccgcacactgactccatggacagtgagcctcccaatttgcctccaccattttatcatctaggaagtctgtgcctggtgtccaattcaaggtggtcacagccacttgaccatgcctccctcgtggtggcatctcctgactgactgcaccaggcttcctagacacatggcaagtgtggtccagtctggggacaggcagggatgggagggaagagtggggacagtggcgctccaacctgctcagcacccttggaagaggccagcccctggccaggggctccaaacacccccgccaccagtaatcctaaacgtcgtccccatctctagcctctcccttggcgctgggctgcctgggaagagaagcaggagccacccccccaatcctactggggaagccagtggaggctcagaatgttctccacaagacttgctgtggagaaggcagctagggcggtgagcttaaggccagctccaggccagagagacctgcttccaaagcccagggcttccctctccttggcccaggcagaggttgcatggcggggactgggcctgtcccgtggtggtgtgggccctgccagtgctgtggggtgggtacagggacactcaccgcaatggtcttctccttgatgccaccaacaggcaggatcttgcccgtgagggagacttcgccagtcatggccagattctgccggacaggcctgcccatggccagggacagcagggccgtgacgatggtgcagcctgcgcttgggccgtccttgggggtggcgccctgtggaggcatgtggggatagtgggtgagcaggtggccagcagcccagggactgggcgggagcaggtgggagcggatggcgcggtcacctcgggcacatgcaggtggatgtgtgaggtcaccaggtagtcattggcgggggcgtgctgcatgaggaaggctctggcgaaggtgtaggctatgcgggcgctctccttcatcacctcccccagctggcctgtcacctccaggctgccatccttgtcacccttggcatccttgtcctgtggccgtctcagggatgtctccacaaacagcgtggagcctcctgaaacaggtgtggagctgtgaacacgggaggcctcggagcccaggccggtgctcactccacccctcggggccactctgaccgctcctgccccagtttagcatcttggtgcccctgggcaggggttggtgtcccatcgtgagccaacgctggcctctacgtttgctgcgttgcgggttcctggctctgtacgccccacagggcagcccccagcagctgccagccacagaggacacgcccagggctacaaggcccagctgccgctgccctgcagacagacacaagcccttctccagcccctcccgcaccatcccctttgccctctcgcctcctttgtgcgtggtggccccaaggcccatctggatgagcttgtccttacctgtaagcctatcaaagtggcacccaaatccataaggcccatggtgtgctgccacccccatgtgtcacagccttcccctccctcagcccagaccccctgggctcccagcacaccaccccccgccagaggccgttcagagccacctgaggcccactgcacaggtgtacaaggtgggacctgcttgttctcgggtagaaatgggaatggctttggggtcttctcccgccaccacgctcacccattgcggtccaggccagccccatgaccacgccgggcggtgtcacgtcatacatgcgctccacggtgaacacgggcttccccacgaagtcctgcaggttctcgggcgtcacctccacggactcggcctcgccgctgacaatcttgtaggccgatttccgtaacacctgggcggtcagggcaacacaatgggcacgggaaggtggggtgacaggtgcggggtggtggggtgacgggcacagaaaggtgtgacgggcgcggggtggtggggtgatgggcgcaggaaagtgggatgatgggcatggaaaggtggggtgatcagcgtgggatggtgaggtgggcggcaggtgccaggagggcgggctggccgctcaccttctccacttgcttctgcaggttgcggacaccgctctcgcggcagtactgcttgatgagcagcgtcagcacgtccgatgacagcttggccttgctctcatccaagccacacagggcgcgagcctggggcaccaggtagcgctgcaagggcaaccgtcagggttgggtctggagggaccttgcccaccagctcagtctagaacctgggagccaatgcctctcccatggcccccagaccctggcctgggaacgaggtccctgatggtgaaaccagggcctggacaccccgccctgccacccaccatgcccagaggccccaggcctttgcttgtgctgcgtcctctgcttggatccacttcctatcccccaatggtatcttagatgccgcttcctccaggaaggcctcctggttgccccatgggctggccccatacacagacccagggcctgtagggtggctgactggttacgtggctgctgccctcagcacatgaggaaggggactgggtcaggggctccagggtcacccacagccccacacaattcttgccacagttctgagctctaatggcatgggggagggcatctgtgagacggacagagccatgcaagccactctacatctgccactgatactggggggcactcctgatgccctgaggggtccccatgccccccagtcctgtccccaggaactacaggcccgtcccttggagaagtcaggctgggaactgggcccagcagtgggcattgaagcccccaggggacacgaggatgctgggagggcctcaagggcagggaccagtgcccaccactggctgtcaaagggctcctaggggagaaatgcactcagcacctttgcagaaaaaaaaacacatgagaaatatgggcccctgcatgctcctcactgaaaccacttctcctccaagcctcattctgggtgggagccacaggccccactgcttccggctgccagaaaccttccctacactctgggccaggtgggggccccaccatggggcagcctggaggccccgggagacagagtgtgtggcctgacggtggtgggcggtgttttggacagtcccaggccctaaaccctgcgcccactcgcgccacctgcagctgctcgcaagcgtctggtgtgtctctcacggccccatctgctcctcggccgcaggtcccacctgtctctcccgggcccaggagctcccagaggcacggcctctgcaggctctggggggcgccccctgctctgggaaggggacagcagtggggaggggctgggcttacctccgcaatggccagcttctcctgggccacgtagcccgacacgttgatcatctccatacggtctcgcagcggctcggggatggtgtccgtgacgttggccgtgcagatgaacagcacctgggggcggcggcaaggtgctgggggactggccgcttaccctccccagcaagcccaggccccagacaggccccccaccttggacaagtccacgggcacgtccaggtagtggtccaggaagttggcattctgctctgggtccagcagctccagcagtgccgacgacgggtccccctggtagcctcggccgatcttgtccacctggggcagcagacagcaggtggtgcccctcgccgtgcccctggccagcccgcccagtggggagaccccagggtcagggctggggagaccccgagtgagagcggcacccacaccctgccttggacgggcagcctgctgggcgtggctgtgggtgggagggacccgtccgtgccatcagggccagcatcacggcgatggcccctgagttggctcggggatcctaggacccggaaggctcggcttcatcttgcacacggcattgccgggttagggggtctccgggcctctccgcacgcacctcgtcgatgaggatcagggggttctccgtcttggtcttcttcaaacactggatgatcttcccgggcatggcgcccacgtaggtccgcctgtgggtgcacagcggggtcagaggtcacttggtagcctggctcggccacaacgacaccatgcaccctccagggccacaggggagaggccacctggagccccacaagatgtggccatgatgtgggaggcggaaatgctggcagccgccggatgtgtggcacctgcaggcacgctggtcacttgccctgactcgccagctcagattctggggtcactgattcaaagccagatctccctcagtcccatccctcagctgacaccatggtgaaagccagacaggcgctggcagcagaaggcccccactcctcactgagggacgccaggcacgcctcagccctcaagggctggggtgatactagccatggccagcactggctctcaggagggcttcctgcaagctctgtgctctgccccagcacaggggcccggcccgcgacagggacagaagaatcccaggccccacgagagacagtgaggaaggctctgtctgtgggatgaagacacagggaggcagggatggagggactgagatgccactgggatgtgtgtgacactttaagtgtgcaggggggtaaggagtgtcttagggagaggccccgagcaacgcacgtgaggagagagccacgtgagggtctgagagatgtgttccaggcccaggacacagcccgtgcaaaggccctgaaacaggaccacgcctggtgtgttagaagaacagtgaggaggccatgaggctgaggcagagggaggagggggggagagaagagggaggagagggggaagagggaggagatggagagggaagggggtagagggagggggaggaagaagagagggagagagaggagggggtggggcaggtcatgcggggtcctgtgggctgcagtgagaacttgggctttgaccgaggaacgtgggagccctggagagctgggggcaaaggagggttttgctgctgttaataacaacgatccatcgccccgcagccagtctcctgtccttgtccttgtctcaggaacccagagacgtcagcagacgcctgccctccccgcagccccgctacctggtgactccctcccaaggccagaggtgacccaggcttgttcagaaccccgccagggtctctcctccggcccgcacctccagccatccctgaaccaggctccaagaggcttcgcgaccacttcaaaccgcttgcccaggaaggactgggtgccccccacccccacccctccaccttcacccagctgctccttcctgctcagaccccagcccaaccaagggcctgcagaacaggtcccctgtcctccccctcacaccccccaccccctagtcaatctgggactccccaaagctgcactggccccacctcctccagctcctcccaactcccggctggtcagagtggccgccccctggggactggacactgcgcgggccagcatgctgtcacccttgcagcgggcgggcagatgctaggaaggcctgagccgggaggtcgggagctggggatgtttttagagaaggcagaaatgttcactttaaacctggactcaagtgaatgccttgcaggatggaaacacgtggtggactcagcagatgcctcacactcggctctcactgaggctacggtttccaaagaaccgctgtctacagaggctggcgaggagggaagccccagaaaagccgcgcccggctgcccacccaaagggtcaggtgggagggcgctgaactctgagggccgtggcccctgcttctgggcctgaggctggccgggacgagtgagcccacagaggcgccaaggtttctctggtgtgcgcggcccggtcctcactggagaccgtctctcctgactccagcccacaggcttcggggtggggggtggagccgaccccacccctagtcctggggcatcagccacagcccacatagaccagcatctgcacggcaaacgccggccctgcagctctggcccgggcattgcaggtcctatgctggaactaccgggggtgtctgctgagggccggcccgagaagtctctctcccaggggtcaagccatggaggttcctgccagcgctgtttgagcacctggaatcagctgggcctgaagtccgccacatggctggacttttcagttactccagcatgagtggaatcggttgcccacaacccggattgctctaccagatgttaaagggtgaccggagaagacgaagcccggcagcacagctgaggggagtgcgtggggagagctgtcaggccaggcctacctgtggcccttgatctcagccacgtcagtcatgcccccgacgctgaagcggaagtactctcggttcagggcgcgggcgatggagcgagcaatgctggtcttacccacgccaggggggccatagaagcagaggatcttgccctgggtggagccgcggagctggctaacggcaatgaactcctgcagacagaggcaggttcagtgggcacgtgagctggggaagccggggacccgcgcatgactctcgccacctgcacactgcctttcagacgtctgagggctgcgagaagggaccaggattgtccgggaggctgagcacatcagagctgccactggccacggggaggggcagcctgtgacaagggctccatttaacaatttaacaccaaaggacaactaggtgctaggagaccgcggccacccggcagtgccaggcccgttcagcagttcccgggaccctgaagaccgcaaatgctccactctctccggtccaacccagagaagcagtccaccaatgcctctggctcctgttttttttttttttttttttgagatggagtcttgctctgtggcccaggctagagtgtactggtgcgatctcatctcactgcaacctcagcctcctgggttcaagcaattctcctgcctcagcctcctgagtagctgggattacaggtgtgagtcaccatgcctggctactttttttgtatttttagtagaggcgaggtttcaccatgttggtcaggctggtctcgaactcctgaccttgtgatccacccgcctcggcctccccaagtgctgggattacaggtgtgagccaccatgcccaggctctgactcctgttttttaacctttgactcccacctgcctgcctggtttccaatgtctcaggagtgatattttaaaaattaatttaaaattaattaattttcagacaaggtctcgctctgtcacccaggctggagtgtagtggtgcatcacagctcactgcagcctccacctcccgggctcaagcagtcctcccacctcagcctcccaagtagctgggactgcagacacgcaacatcacaccaggctaattaaaaaaaattttttttcctttttgagacggagtttcactcttgttgcccaggctggagtgcaatggcacgatctgggctcactgcaacctctggctcctgggttcaagcgattctcctgcctcagcctcccaagtagctgggattacaggcatgcgccaccacgcctaactaattttgtatttttagtatagatggggtttctccatgttggtcaggctggtcttcaactcccgacctcaggtgatctgcatgcctcagcctcccaaagtgctgggattacaggcatgagccacagcgcccagccgcaattttaaaattttttgtagagatgggggtctcactctgtcacccaacctgatgtgcagtggcatgatcacagctcaccacagcctcaacttcctgggctcaagtgatcctcccgcctcagcctcctgagtaactgggactacaagcagccccaccatgcccggcccgtcaggcatgacttcagtccacctgggaaatcctcgagccctcgggggcagggcaggatgctacctccgccgggatccccccgaccagcacccccaggcctacgaattcaccagggggctcctttgaaatctcaacccacagcacacaagagtcctgggcccgggcacccacatgcaaatccacaacaggccagacactgggctcaccaggatgcgtttcttgacgtcctccatgccgtagtggtcttcctccagcactgcctgtgcccgcgccaggtccaggttctcgttgctgtacttgccccaagggatggacgtgagccagtctaggtagttgcgggtgacactgccaggggacagatggagagatgctgagtggagctcacgagctgcctgtctctctgctggacttggctgggtggttgcaaggggcttgaaacccatgtgtggggctgagcgcggtggctcacgcctgtaatcccagctctttgggaggcccaggtgggaggatcacttgagcccaggagttcaagaccagcctgagcaactcagcaagaccccatctctataaaacaatttacaggccaggcacagtggctcacgcctgtaatcccagaattttgggaggccgaggcaggcggatcacaaggtcaggagatcgagaccatcctggctagcacggtgaaaccctgtctctactaaaaatacaaaaaatgcttctgcctctgcctctgccctctgcctctcccctttccacggtctcccctttccctctttccatggtctccctctgatgccgagccgaggctggactgtgtgctgccatcttggctcactgcaacctccctgcctggttctcctgcctgagcctgccgagtgcctgcgattgcaggcgcgcgccgccacgcctgactggttttcctatttttttggtggagacggggtttcactgtgttggccgggctggtctccaggtcctaaccgcgagtggtccgccggcctcggcctcccgaggtgccgggattgcagacggagtctcgttcactcagtgctcaatggtgcccaggctggagtgcagtggcgtgatctcggctcgctacaacctccacctcccagccgcctgccttagcctcccaaagtgccgagattgcagcctctgcccggccgccaccctgtctgggaagtgaggagcgtctctgcctggccgcccatcgtctgggatgtgaggagcccctctgcctggctgcccagtctggaaggtgaggagcgtctctgcccggccgcccatcatctgagatgtggggagcgcctctgccccgccgccctgtctgggatatgaggagcgcctctgcccggccgcgaccccgtctgggaggggaagagcgtctctgcccggcagccctgagaagtgaggagaccctctgcctggcaaccgacccgtctgagaagtgaggagcgtctccgcccagcagccaccccgtccgggagggaggtgggggggtcagccccccacccggccagccgccccgtccgggaggtgaggggcgcctctgcccggccgcccctactgggaagtgaggagcccctctgcccggccagccgccccctccgggagggaggagtgggggtcagccccccgcccggctagccgccccgtctgggagggaggttggggggggggtcagccccccaccaggccagctgccccatccgggagggaggtggaggcgtcagccccccgcccagccagccgccccgtccgggagggaggtgggggggtcagccccccgcccggccagccgccccgtccgggaggtgaggggcgcctctgcccggccgcccctactgggaagtgaggagcccctctgcctggccagccgccccctctgggagggaggagtgggggtcagccccccgcccggccagccgccccatctgggaggtgtacccaacagctcattgagaacgggccatgatgacaatggcagttttgtggaatagaaaagggggaaaggattgagaaatcggatggttgccgtgtctgtgtagaaagaagtagacatgagagacttttcattttgttctgtactaagaaaaattcttctgccttgggatcctgttgatcggtgaccttacccccaaccctgtgctctctgaaacatgtgctgtgtccactcagggttaaatggattaagggcggtgcaagatgtgctttgttaaacagatgcttgaaggcagcatgctggttaagagtcatcaccactccctaatctcaagtacccagggacacaaacactgcggaaggccgcagggtcctctgcctaggaaaaccagagacccttgttcacttgtttatctgctgaccctccctccactattgtcctatgaccctgccaaatccccctctgcgagaaacacccaagaatgatcaataaaaaaaaaaaaaaaaattagctgggcgtggcagcggacacctgtagttccagctactcgggaggctgaggcaggagaatggcatgaacccgagaggcggagcttgcagtgagccgagatcgtgccactgcactccagcctgggcaacagagtgagactccatctcaaaaaaaaaaaaaaaaaaaaatttacaaactgccctgtccaaagcacccagtgcaggaaggaggagatggccggaggtccactgctgactcatcaggagagccaagacggcactggcttctgcccagggctgagtgagcagaaccacagaggggacgaggcttagaaaatgggacaaggcctgacccagggcaggtggggaaatggaggccaggtcccctgccgggagagtgacgctgaaggttgggagggcaactccatattggtccccaagttgggagccgtgcagcagtgagcagcggccactatgggccaggagcaagtcagtgagggctgcaagagcacacggcaggattggggaagaggatgaagaggaggacggcttccgaggaagggccaggcggccccacgagcagacaccgtcagggcgcactgccacccaacgggcatacgagacgcaccgggacaggccagctgggccacacggatgctggagtttagagacacatgaagtcactgtggaagtgacacaggcagtgacactttgcggagagcattctgggtgggagaggtagctggcagcctgctgcaggcatcttggtgacacgcaggtactgagggcttgtcccccgtgacttcccaggacctgaggacagaacccgccttacagaccccctcagctcctgggggaaggagctatctgcttctgcaggacaaggcccggtctgagcaggtacttccaccagcccaagggcagctgaggcactcgctgggagacagaagaaccccgaaaacatctacgttctccccccacaggaggcggcggcacaggcctctcacatggcagcagggaactgcagatggggctgagtgaaggtccccgagacaggagagcattctgggtgacccagggggcccaggttcctcaccaggtcctcacgacaggcggtgggaggtgagagactgactggaagaggctgcgctgtggctgtgaaggaggaaggggccccgagccgagggatgcgggcgcctccagatactgggaaaggcaggaaacggattctcctctggagcctctgggagggacgggcccggcccacagcgggatctcagggctcggcattgtgtaaggcactaagttgtggcaccgtcggagcagccatgggagctcacaggccactcaccgaaatcggggcgtgctgggaggggaagccacagccttcgcgcgcaaccagtgcctctcagggccctgggggagagactccggcgaccgtgacattcaaatctgaggcggggtcctgggccagcagccaggaaagaaactcatgccttccctctaagcgctgtcctacggcctgcccagccctgccccggggacttctgcctagaagctgccctggcgtgacaactggttcctgggctgaaaacagagcatgctgcatgggaagtggccaggtgggttctgtcctggctggacatgggcatggctgaaaggatctcagaggtacctgaggccctcaaacctggggcggccaccctgactcatggcatgctcaggacagtggcccccgggcaaggccagtgctgcgggaaggcatggtcacttcctggctgactctcgaaggggcaacagaagccaggggtagccttgcaaagacagccatggggactcctggtcctggcgagaaggcctggcttaggccaggcgtggtggctcatgcctgtaatcccagcactttgggagggcaaggtgggcggatcccttgaggtcaggagtttgagaccaacctggccaacatggcaaaaccccatctctactaaaaatactaaaaattagctgggtgtggtggcacatgcctgtaatcccagctactcaggaagttgaggcagtagaatcgtttcaacctgggaggtggaggttgcagtgaaccaacattgcaccactgtactccagcctggacaacagagcaagactctgtcttaaaaaaaaaaaaaagccaggcatggtggctcgcgcctgtaatcctagcactttggcaggtcaaggcagccggatcatttgaggtcaggagttcgagaccagcctgaacaacatggtgaaaccccatgtctcctaaaaatacaaaaaattaaccaggcgtggtggtgcatgcctatagtcccagatacttgggggactgaagcaggagaattgcttgaacccgcaaagcggaagttgcagtgagccaagattgtgccactgcactccagtctggacaactgagcgagactccatttcaaaaaaaaaaaaaaaaaaaagcagccctggcttagagccaggcgtccctgggctcaaatccgtggcaccacctgccaattcacaggccctggccaccagctcaacagccccgagcctcgatttccttgtagaatggagatggtgatgatgtgtcctgcccagaacagggctgatactcgctggatgcctcccagcccgcacctgccacaccaagaaggtgccacggggctccccgctgggtcccctggcctgcctaagatgggggctgaggaggggtcacctgagggctgggccgccccgggcctggcactcacttgaactccgaggagtggttgtccagcaggcccagcttgctcagctcctcgtccacaacatccatgacgtgcttggggaccacgagctccttcaggcgctcccggaacttctcctcgatggcatccttgtcgtccttctccaggcccagctccttcttgatgatctttagctgctcctgcagcaggtacttacggtgggtctgcttgatcttctcctccacctgtggggtgaggtgctgccatcaggccctggctccgggaagctgggtgggtgggtgcgtccccagacgaagggggaccctctgctcccccaggactcagagagaaaagaaacgaaacccagagcacgaagcctttggttccttccatcttcttttgtttttgagacagggtctacctgtgttacccaggctggagtgcaaaggcaccatcatagctcaccgtagcctccacctcctgggctcaagcgatcctcctgccttagcctcctgagtaactgggaccacaggcacctgccacacctggctctaattttaaaattttttgtagagatggggccaggcgcggtggctcacgcctgtaatcctagcactttgggaggctgaagcgggcggatcacttgaggccaggagttcaagaccagcctggccaacatggtgaaaccctgtctctactaaaatacaaaaattagccggtgtggtattgcacgcctgtaatcccagctactcgggaggctgaggtgggaggatcacttgagccctggaggtggaggctgtagtgagctgagattgcgccattgcactccagcctaggtggccgactgagaccctgtcttaaagtaaaaaattctgaaaaatgctacgaccgtgaggtgaccggccatcaggcaggctgtgatctgccgaaaatcatgacagcgagcctcaatggctgggtcttaagaaacagcatcttcacttttcccaggctgctttccaatttccaacactgtccccaagattacaaaggcaaaggaattcttcccttaatgttggacggtcctgagactgctccaccctgggctcattacactgggaccagctttaagcttccctgttcaacgcggagagttccacagcccaggacgacagagcagatgatggcacgaagccctcaaaacccagacaggccttcttggcttgccctggccgatgccaccggtccctccgtgtgctccagagcctgactgatgtcacgtggcccgaggggaaggcccccaagagtggctgcgcctcagccgcgggctcacctcccgccccaggcgctgctgcagcttgctcagttcaaattccttcttcagcagggagagggccttgtacagccgcttaggaatctgccgagacagggaggacagaaaggatgagcagaagtcggcatctgtgtgtgtagggccgaggttgggggaaaatgcgcaccctgagagatgctgccgggaggacctggccatgctgtacccagcacagaggcatgtgtgccctctgccccaacaaatcccgtgctggaaacgcatcctacggatacttcacaggccctccagctgcgtgcatggggacgcgctcaggagtgctgctcacaacagcaaaagactggcaacgccccgggtacacggcccagaggatcccactgaacccgcaacggtgactcccaaccgaaggctatgaagccaccgaaaggcggatggatgtggaccaagacacgcagcgggaaatcatctcaaaaacagagccagggacacacagctgggtgtggatggtgcacggtggagggacaagggcagccaggcatgggggagctgaggaggaacgggggcagccgggcgtgggcggagcatagtggaggtggggtgcagccaggcgtggggggctgtggaggtgacgagcactcacattggtctcttccaggacgtcctgcagctcatgggactcggccccggtgagcgcggcgcccatgtcgctcaggtagatggggttgtccaccacccgctggccagcctgcatcatctgcagcactgactccctgggggacaaagggagctgcctcggtggccagggcctcacgctctgctgcagtgcagcccccaaacggggacccggtcctcagggtccctgtcccctgtagctatgggcacggtctaggggtgctcgctgggagccagctctgctgcttgttctccagagttcagggcccacccgtcctgggctggaaaggcatgcagcatcctcacgtgcagccaccacgggagccgtgcagtgacctcacctcagcagtctgctccccactcccccagccaatgccaccaacagcttccggcctcagcagaaggggacaaagaaactgggcctgctgagtcggccccgggcctcccacctgccccatgccccagtgggcaacgggctcctccacacaggccactccttggggcaggcaaggtttcctcccaggaggacgctgaggaagccccctacccacccagctgcagaaagagctgcagagatgcccccgcctggccagctgcccgcacagaggcccacctgtagagagggttcaaggcaatgatgtcccggatggtcttcacgatctctgcagtcagggcctgccaagtatggggcagggtcgctggggcccagcagtgctccagcagggggtgggctgggtgggagcatggccctgggagccccacccaccagctccatcaactccctcccctccgccaactggccctggccacggacggcctgggagatggaggagtgcagtccctggtggactcaccagtcccagggacacaggaccaagagagtcaaaactaaaaccaaaccctgtctccttacccctcagagccttgtccttaggataagctatctcaggggaaaaaaagagactgtgttttctttcctccattt[131 bp omitted]ctaccaaaaaatacaaaaattaggcgggcgtgatggcgggcgcctgtagtcccagctactcgggaggctgaggcaggagaatggcgtgaacccaggagat[140 bp omitted]actcactgcagccttgaattcttgggctcaagcgatcctccccgctcattttccggagtagctgggaccacgggcataagcaactgcacctgcctacaaccaaattttaatcacctggtcttggccgggcgcggtggctcacacctgtaacaccaacactttgggaggcagagttaggtgggtcacttgaggccaggagctcaagaccagcctggccaacacggtgaaaccccatctccactaaaaataccaaaaaaaaaaaaaaaattagccaggtactttggtgggtgactgtaatcccagctactaaggaggccgaggcaggagaatcacttgaacccaggaggcggaggttgccatgagccaagattgcgccagtgcactccagtctgagtgacagggtgagactctgtctccaaagaaaccgtaatcacctggtctctagtctttggctttgacgctgaactgtctgagctgaccctggtagaaggcaccagaacaggcccactggaggtccggggcacttgctttaagaataagttcagctgggcacagtggctcacgcctgtaaccccagcactttgggatgctaaggcgggcggatcacgaggtcaggagatccagaccatcctggctaacacggtgaaaccccgtctctactaaaaaatacacaaaaaattagccgggtgtggtggcgggcacctgtagtcccagctactggggaggctgaggcaggagaatggtgtgaacccgggaggtggagcttgcggtgagccgagatcacgccactgcactccagcctgggcgacagaggctccatctcaaaaaaaaaaaaaaaaaaaaaaaaaaagaacaagttcgctgcccctaaggggtcttgccagttctaatcacatttgtaagtttggtcgctgtcttccccctgttgcaagattctcacagggaatgccccaatgctgagctgcccaggacagtgtagccgctggtggctgtctgaattttttttttttttttttgagacagagttttgctcttgttgcccaggctggaatgcaatagtgcaatctcggctcaccgcaacctctgcctcccaggttcaagcaattctcccgcctcagtaatcccgagtagctgggattacaggcataagccaccacacctggctaatttttttttgtatttttagtagacacggggtttct[139 bp omitted]cactctgttgcccaggctggagtgcagtgatgcgatcacagctcactgcagcctcaatctcctgggctcaagcgatcctcccacaggttagaccactggtgtgtgcgaccatgcccagggattttattttttttgtggagacaggggtctcaatattgcccaggctggttttgaactccagggctcaagtgatcctccttccttggcctccaaaagtgttgggatgacaggcatgagacactgtacccagccaataaaatgttccattctgttccttggccacagcagctctacttcaagtgctcaatactcacaggtggccgggcacagtggctcacgactataatcccagcattttgggaggctgaggtgggcggatcacccgaggtcaggagtttgagactagcccggccaacatggtaaaacctcgtctctactaaaaatacaaaaattagccgtgtgtggtggcacgtgcctgcaatcccagttacttgggaggctgaggcatgagaatcacttgaacctgggaggtggaaattgcagtgagctgagatcgttccattgcactccagcctgggttgacagagccagactctgtctcaaaaaaagaaagaaaaaaaaaaacctcgcaggggtagtggggcaggatagaagtgctgacctcaagaacccaggtgggcctgtggacaggactttccacccctgccagcgcccacagcagacatcaccagttgctcacagcacttccccctaggccctgcagcagcctggggaagaggctgatgacaccaggcacacaggtaaggagctgacacgcttcaggcctttggttagcttcgctgactgtccctacagcgggagggcaggtggcaccgccaagagcctgcccacctcggaagctgactccttgtgccaccaggcaggcaggacggcctaggttgggggatcagggtggccaacaggctgtttcctgtcctgcaaccactggtaccaacctcccaggcttggtgggaagaagccagggctggaaggtgtcttggtaaccgctggaggctttggcacaggggacacgggctggggctggacctgggttccaaccctgtctccttcctgagcagctacaggctccagcgaatttcctgtgcctctcccatcccagagtcttccgaagacctctgggaggaaaagcaccctctatgttccattagaattgagttccagacaggccagacccttcctaaggggctcagggtgggagatgactcttcggagaggccgcaggaacggctcaagggagcccgtgggggaggcagctgtggccgccctgcgtgacgcacggactcactttcacctcctccgtgacctggaagtcctcgtggacaacgttctctacctccaccatgagcacctcagccgggagctcaggggtgggctccatcgccagctccgccgggtgcctggcgctcagctcgtcctccgcctccttcttgccccgctttgacttcctgcggggcttgtgcttgttctccgcctccggctcctcgggctccacctccagctgtctgctgatatggactctgacacgggagcaaggcaggtgtgaatcagccgctgaggctgggagctggacccggctgaggcctccctggtggcacaggtggtccaagggtcccgctgagcccagacctctggagccacagggtggctacagggtcctcaagctggagacgtgagccgctttctcggggcctcccaaccagtgtcccctccaccccttagactccagccagattcaggcattccctgcatcccacgccaatgcatcactgtccccatcctaagtatcgtggataagctgcagtgacaagccccagggcctcctgtcgaaaacggtgtcagcctggccgggcacaggctggtctccaagactctgtgccctggactcagctcatagcagctccttcctgttgttcaggtctcgatttcaaggacaccatcgcaaagactgtccccaagcacttcacaaaagctacccacctccacctctcacgctgtctgcgtctcccctcagagcacctggcaccacctgaactcagggtctcgctctgttgcccaggctggagtgcagtggtgtgatcatagctcactgcagcctttacctcctgggctcaagcaatcctcctgcctcagcctcccaagtagctgggactacaggaacacgccgtcacatctaactttttattattttttatagaaacagggtcttgctgtgttgcccaggctggtctcaaactcctgggcttaagcgatcctcccacctcagcctcttgcgtagctgtgaccacaggcatgagccaccacatccagctaatttttctacattttttgcagagatgggatctcgctacgttgcccaggctggactcaaactccgggctcaagcgatccaattgccttgacatcccaaagtgctggaattccaggcaggagtcaccatgcctggccctgcagctcacccctttctgagacaggaggggtccagaggtgacatgtctcactctcacccccagctctggcctcagtgctagtgagaaagccgctgggctgacggacagggcagaggctgatgctggggcataaggcatcctggctggtctcccgcgtggtactctgcccccacctcccactgtcccccgccagccacccaccttctgtgtcccatgacgatcatgcgcagcttgtccccaaggtcctgcatctcatggatctgggcaaacgtccccgtgtggtagatttcatccaggctctcgaccacatccgactcattgctgtgggagaagagcacagaggaatgttggaacatggctttcatgctaggcaggatgtctctggctgagatggaggagggagagaaaagaaacgcccctaccaaatgctactgaaaaccaagagcggcctccttggctcccgcaggagctccagagcctaggggagcttctgccaggccagggctgccccagtggtcacaggaccgggtgggtggctcctcgctaagtcagccacaaagacatggtccaggtgggactttgatgagtctcttctatgctatcacagagcctgcttcgaatgcatgcatggaactctttttttcttgagatggagtttcgctcttgttgcccaggctggagagcaatggtgtaatctcagctcactgcaacctccacttactaggttcaaccgattctccttcctcagcctcctgagtagctgggattacaggtacctgccaccacgcctggctaatgttttgtatttttagtaaagacgaggtttcatcatgtcagccagactgctttggaactcctgacctcaggtgatccacatgcctcagcctcccaaagtgctgggattacaggtgtgcgaccccacgcccggcccatggaactcatttctacatggagccacatctccgagcagctagctcgactttcaggtagcctcatggagcatttcatcactaagagtccctgaagttaatttcccccgtatcttaacaatgcatgaagtttagtactacaagctgagttctcagcccaggctgaaaaggtagcctgcgtggcttctggcctttattctggaggtcttccctggtttcctcggggtcaggggtcaaaggtgcaaagtacagagtaggacttgtggtgagctggactctagggcaccgtcaacaagggaatgaaggaaaaatcacacttacctgtcatctctctttagaaagacgccgacataaggctgggcgagacgaactttccttctcagcagctcaaccaacttcttatttttaacctagcatgacaatgaccccaaagtgaaatgcagagtagattttttttttgagacagagtctcattctgttgccctggctggaatgtaatggcgtgatctcagctcactgcaacctccacccccactgagttcaagggattctcctgcctcagcctcctgagtagctgggattacaggcatgcaccaccacacctggctaatttttttatttttagtagagatggggtttcaccatattggccaggttggtctcgaactcctgacctcaggtgatccacccacctcagcctcccaaaatgccgggattataggcgtgagccaccaaacgcagcacagggtagcttttcttttttttttttttttctgagacggagtctcgctctgtcacccaggctggagtgcagtggcatgatctcagctcactgcaacctccgcctcccgggatcaagcaattctctgcctcagcctcctgagtagctgggattacaggcgcccgccaccaggtccggctgattgttttgtatttttagtagagatggggtttcaccatcttggccaggatggtctttaactcctgacctcgtgatccacccacctcagcctcccaaagtgctgggattataggcgtaaactaccacgcccggcctcccagggtagcttttgtagctgacattttttgacagcagagccgctctaacgctgtgtagattattctctggggacatgctgatccgcatcctggatactaatcaacatggtttgggaacgcctaaacaaaaaaaaaaaaaaaaaaaaaaaagtgctggaggccaggaggctgtggtggtgaatacagtgagcagaactgaccagctggattcttcttagcggtttccccactcccaaaggaaattcaaagtagacgaatggtcagaacccagaaattgatttaacatccagcttcaaaggggatgtccagggcaaactgtcttggtttgaaaatcaaaaccattctgcttttattaatgtcagaataaacataagtaatttaaatgtgacccactccaga[223 bp omitted]gaggcaggagaatggcgtgaacccgggaggcggagcatgcagtgagccaagatcacgccactgcactccagcctgggcgacagagtgagactctgtctcataaaaaaaaaaaaaaaaaaaaaaaaaaaaaaaaaaaagaaagtttcactctgccacccaggctggagtgcactggtgcaatctcggctcactgcaacctccacctcccaggttcaagcgattcttccaactcatcctaccacatagctggggttacaagcacacgccactgcactcgctaatttttgtattattagtagagacggagtttcgccatgagccaccatgcctggttcctccaattttcattgacagttacttccttatcacatcatatgctgttcattaatgatcaagacccccaggatcacagcacattctcaacggcaggttcagggctaatgatgtcttctaagaagcatttgaaggcgcaaggagctcacctgatttctttcaagcctttgttaattcactggacagaccctgattaaaggtaatggcctggctagcctggtaatggtagctcatgcctgtaatcccagcactttgcggggctgaggtgggaggatcgcttgagcccaggagtttgagaccagcctgggtaacacagtgagaccccatctctattttctttttgaagtttttaattctttattatataataaagttaaaatatacatatatatatatatatatatatatatatatatatatatatagtaatggccctcaaacttttgcaggcaccaggatgacctgaaggactttaagcagctcactgctgggccccacccttggagtttttgattcagttctagggtgggtccaaaaatctgcatttcaaacaaaagagcatcacatgatgccgatgctgctggtccacaaccatcctttgagagccagtgttttgactcactccctaacacaggctcttaacttgtggtccagaaattcctgacactatagatacataattttttttttttctgttcccagaaaaaaaaaagtcagtaacatctgacaggagggtgtgtgacccactgttataagtaaaatgtttgtttagagacagaacgcttgtacctctgtactgtaaggaaaaattagcatttggacaaaaagttttcttagcaagacaattttactttctgaagaaagggtgctcctcgcagatggaacaatggcgagagcagagcacacctgaacaaaggagggaagcaatttttttttaagacagagtcttgctctgtcgcccaggctagagcgcagtggagcgatctcagctcactgcaagctccgcctcctgggttcacaccattctcctgcctc[135 bp omitted]agcctcccaaagtgctgggattgcaggcgtgagccaccgcgcccagcccacgaagttagtttttaaaagaaactaatacttctaacacttatgatttattctttaatacccaccaaaaattaagagccattgttccttactcaaaagttgctaataggagagaagcttctagagcaagttggccagacaagtcaagtacaaactgaagagtaaatcaagctttgctaacaatttcagaaacatttattgggtcccaaagaagttgcctcccaatttcccctctgccaacagctgatagctgcatccttggcatctgcctcctggccttggcaggatccatttttatgatttacaatgcatcatcaaccagaaatacaatgagaaccacctgccagtctcccaaatactatctgcagccactcatttaactctcctggctagctccacgtgggccgtctgaactctcttagaagaatcatctctctgctcaggcaccgggagcaaggggcatctgtcgctctgcagaacggaggggaccaggcctgatgaacaccatcctgggcccagaaacctgggagggtaaagagaactgccaggggtgaagtcaaggatgggaaaaaggcctccggggcagagtcctgaaatgtcagaagtacaccaaagaggaaacagcatcacgttattgctgaggcagggcctcattctgttgcccaggctgcagtgcagtggtgacaccatggctcactgcagccttgatctcccagtttcaagtgatcctcctgcctcagccttccaagtagctgggaagacaggtgcatgccactgtgcccggcttttctttctttctttttttttttttttttgtagagacagggtctatgttgaccatactggtttcaaattatgctcctgcctcagcctcccaaagtgctgggattaaacatgtgagacaccgtgcccagcccacatggcctcatttaaatcccacaacaactctaataagacactaatatgtccaggtcacagatgagaagagggaagccaaaggaataacttgctgaaggttatggagctaggataggaccccacaaggtcttgctctgggggcctgcatcagtaaccagtactcaacatcaaggaaaggccttggggccgggcgcagtgactcgcacctgcaatcccagcactttgggaggctgaggcgggtgaatcacttgaggtcaggagttcgagacgagcgtgggcaacatggtgaaaccctgtctcttctaaaaatagaaaaattagccagccacggtggcgggcgcctgtaatcccagctactcagggggctgaggcaggagaatcacttgaacccgggaggcagaggttgcagtgagctgaaatcgcgccactgcactttagcctagatgacagagtgcaacttggtctcaaaaaaaaaaaaaaaaaaatcttggagcagcgttggagaagctccctctgtcccctctctactggctgctgcccctctgaaatggcctttcccttcccaacagatccttgagatttgtttagaagagtctggagagtgagcgcagaggctgactcactgcgtgaccttgctctgccagttaggagataaccttcccatagatgccactttccacatcagtagtttttttttttaagggaaggggagctgggggagaaggcttttggggccttcctactgtaaaagctcaagttccttacactcactgctttctctctattacatcatcctgctccctccccacccccaaggctcttagtctgaaatgatctaatttctaccaccggaatgacttgttctctacagtattctcagaacttgctacgtggtaggaggtcaagaacacactgaataacccacctcttcccaccctcctaagcctcctgtcccatccatgctctactatttctcgtaattattgccttctaatacaatatcgttactaaacatctttattgcctgtctcatcctgccaaaatgtaagctccaaggcagatttattttttaagagacagggtctcgccatgttgaccaggctggactccaggtttccaacaatccttccacctcagccgccagagtagctgggagtacagcgcgcgccaccatgcccagcttcaaaggcagaaatttttgtctgttttgttcactgccatatccccagaacctagaacactctctggcaaataataagcaatcaagaagtatttgtctaagaaaggaatgaattctgatcccagtgaggctcgtaaccagacggcagagcgcctggggcgaggaggtattacaaaactcgtgccaagtaaggagaaaactaacagcgccgtaacactactcaggtccctcccggccccggatttctatgaccggcgttctaaagtggataatcctaggctcatcgggttcaactcctctcatctaacggatcctaagaaatccgaaagggagaggactttggctcaaggttcccaagctagtggtgagcagacaaggattcgaactgcacccttcgagaaacttcatgtctgaaaaagttgcgaaacacaagggcgctcaagtgatcccacggttcagcccgctgcttgcacaggtgggaaacctgaggccgaggcggggactcccattacctcgataatcttgataaagcgcgggaacaccgggttgcgggtgatggcgatgagcggcaggtgcggaaacacatcggggatcgtcatgggcgtgagcgccgttatgaccgggccttccccggcgcccgcgctgccccccgcgccgccggctccttcctccgcgccgccctcggaggcgtcctcgccccccgagaatgcgcctccgccgcggctgctcgcttcccaaaacccccgccattggcccccaattgccgggcctcggccccacagtgcccaaggaggagaggcgtcgcaggtccgctggcctcggagcaaccacgctcctgctgcagtgggaacccgccccccggcggcggccagcatcggccgccgcagcacccagcaccgcgccgctccccacagtcgcacgtagccagtgctcgccgccatagcccggccatactggcggctcacacaactcgcgtcatttccgctcgccgcgaaacgcacgtgacgcccggcgcgtgcctcggtacccgatgggcgcgtggctcgaaacagccgcttcagggagctgggcctacgcggagaagagggggcggagttcgagcatcggatcgtctccgcctcttccggtctcccactttatgcgctgaaggccttttccggtcacgtggaaggctgtgagcaggcgccagcgcccgtacaaaacactggtagtgttgcaaacgcaacgtttaggaactcatgagcagcctgtgcacatgcttaggcgcgcggacaacatgcgcatgctcagactctagactggccacgggtggccgggtgcgcatactcaggctctgagcgcactttggggtgcgcggattcgggcttcccgggattcgtctgcgcatgctcaagattcaggcggagcgccgggctgcagtgcgcggaggcccgctcccgggactcattgatgcgcatgcgcagggcttcagcctgcacgtactcggattgtgcagcgactccccgtggcggttgaggggcagtggtggcggcggaagcccaagtcgatgctgatgttgatgctggtggcggctgtgaccatgtggctccgaccgctggtcacagctcagctctgtcggtggggctgccaggactcctggggctggggtgctgccgggggtcgggagggtgctggttcatcttggagccgaggcctgctccccaacctcactgaggctccccttttactctttttaggaatcgaacttgacgcctcgctcaccctactccaccccatcctcccagcccgatattaagctctcctacctctttttttttttttttttgagacggagtctcgctctgtcgcccaggctgcagtgcagtggcgcgatctcggctcactgcaagctccgcctcccggattcacgccattctcctgcctcagcctcctgagtagctgggactacaggcgcctgccaccacgcccggctaatttttttttgtatttttagtaaagacgggggtt[143 bp omitted]tgctctgtttcccagggtggagtgcagtggcgcgatctctgctcactgcaacccccgcctcccaaagtgctgggattgcaggcgtgagccaccgcgcccagccttacccagcacattttgaaatttcagtaaatgttaggttagtgcatactccaacctgccatggggaccagttgctgaaactccgttcctgccctcagggaactcccatctggactaaactgtcacattcagtagggacctgtgagctgtattcttagggtgtatggcctcatttgatgtttacaggaagattcataatgattccttaaccttattttattttatttattattattttttgtacagatggggtctcactggctgggtgcagtggctcacgcctgtaatcccaacactttgagaggtagaggtgggcagatcactcacttgaggtcaagagttccagaccagcctggccaacatgatgaaacctcgtctctactaaaaatacaaaaattagccaggcttggtggcaggtgcctgtaatcccagctacttgggaggctgaggcagaaaaatcgcttgaattcaggaggtggaggttgcagtgagctgagatcgcactccagcctgggtgacaaagggagactctgtctcaaaggaaaaaaaaaaaaaaagagatggggtctcactgttttgcccaggctggtcttgaactcctaggctccagtgatcctcctgcctcagcctcccaaagtgttgggattacaggcatgagccacccatgcccagccatacccttattttatttttttgagatggagtcttgttctcgtcgcccaggctggagtacaatgtcacggtctcggctcactgcaacctccgcctcccaagttcaagcaattctcctgcctcagcctccagagtagttgggattatgggcgcctgccaccacgtgcagctaattttttgtgtttttagtagagacagggttccaccatgttgcccaggttggtctcgaactcctgacctcgtgattcacttgcctcggcctcccaacgtgctgggcttacaggcgtgtgccaccgcgcccggccaacacccttattttatagatacgaaagcatacttaggaaagttaaagacacacttgcctaacaacacatacctagtaagtgggagaaacattttccagtgaaatttactaataggatttgtctcgagttctgaaaatgtgggttatatccagttctctcatttccccacacaggctctcaaagaatggtccctggaccagcagcatcaagatcacctggaatttattataattggttagaaatgcagttccctggacctactgagtcggggacttggcagtgggacccagcaaacggtggtttatcaagacccccccccccgcaaccccggtgattctgatgcatattcaagattgagcacctctgctgtaaactataccatccttccagtcaccacacactcccttaaggagccccgaataccttgttgcaggacttcataattttcc[182 bp omitted]tggcgggcgcttgtagtcccagctactcgggaggc[132 bp omitted]agaaattttcagaaatcatttctacattttgtgtgtacttatgtctgtttctgggagaggagtttcatacaaattttattttttgacggaggcttgctctgtcgcccaggctggagtgcagtgtggcaagagctcaactcactgcaacctctgcctccaaggttcaagcgattctagtgcctcagccctcagcctcctgagtatctgggataacaggcgcccgccaccctgcccagctaattttttttttttttttttttttttgagacggagtctcgctctgttgcccaggctggagtgcaatggcgccatctcggctcactgcaagctctgccttctgggttcacaccattctcctgcctcagcctcccgagtagctgggactacaggtgccgcaaccacgcccggctaatttttttgtgtttttagtagagacggggtttcaccgtgttagccaggatggtctcgatctcctgacttcgtgatccacccgcctcggcctcctaaagtgctgggattaacaggcgtgagccaccacacctagcctgttttgttttgtttttgtttttttttttgagatggagtttcactcttgttgcccgggctggagtgcaatggtgcaatctcagctcaccataacctccgcctcccgggttcaagcgattctcctgcctcagcctcctgagtagctgggattacaggcatgcgccaccacacgctaattttgtatattacaggctaattttgtatatttagtagagacagggtttctccgtgttgctcaggctggtctcgaagtcccaacctcaggtgatccacccgctttggcctcccaaagtgctgggattacaggtgtgagccaccgtgcctaacttttttgtatttttagtagagacgagatttcacgatgttggccaggctgatctcgaactcctgacctcagctgatccacccaccttgacctcccaaagcgctgggattacaggtgtgagccaccgcacctggctctaattttcgtattttcagtagagatggggtttcaccaagttggccaggttggtcttgaactgctgacctcaagtgatccacctgcctcggcctcccaaagtgctgggattaaagacataagccaccacgcccagcctcatccaattttctagggcctcctataacccgaaaagcatcaggaacagatacttggctgggcgcagtggctcacgcctgtaatcccaacacttcgggaggccaaggcaggcagatcacgaggtcaggagttcaggaccagcctggccaatgtggtgaaaccctatctctactaaaaatataaaaaattagctaggtgttgtggcgcgcgcctgtaatcccagctactctggcggctgaggcaggagaaacacttgaatctgggaggcggaggttgcagtgagccaagatcttgccactgcactccagcctgggcgacagagtgagactccgtcccccccaaaaaagaacagatactttagggttaaccctgagttggctgagtaggaggattcatgctgaatattcaataaaaattgacagatggtctttcttgtcacttctagttctcgcacagtgaggacaggaaaagtgtttaatctgatacaggacgttcaaggggtatgtggctccatgcttaaattcatccttcacttttgtctaagtacaggatcagaggtaacacttcctggtatttcttgggtgcccgtgttgtcaagcatttaagatcattactttattcagtctttacagttctttcccctttgaaatagggattaatctttcccatttcactgagaaacaagtttagagagatcaagtcatctgaacaacgccaagaggaagaagtgggaatagaactaagatggtctgagtttttatcgagtgttctgtttacttctctctcagataggagattttattttttgagacagggtcttgcactgttgcccaggttggagtgcagtggcgcaatctcggctcaccgcaacctctgcctccccagctcaagcgattctcatgcctcaccctccctagtagctgggattataggtgtgtgccaccatgcgcagctaatttttgtatttttgtagagatgaggttttgccatgttgcccaggctggtctcgagctcctggacttaagtaacctacctgcctcagcctcccaaagtgctgggattacagacgttcaccaccgtgcccagccttgatgggagattttaaaatgcatagtaacagtagaagcaaaccctgttactttgtttacctcatgtaatgtcacaggaaatgtcagtttacttcatgcttaaaatgcatgaagaaaaaatattctgtcagttcaaatt[136 bp omitted]ccccgtctctactagaaatacagaaattagccaggtacggtggcgcatgcctgtaatcccagctatcgggaggctgagtcaggagaactgcttgaacccaggaggcagaggttacagtgaaccaagatcgtgccactgcactccagcctggggcgacagagccaaaaaagatgcataatttcaaaatggtgtcagcattttgaaacaatcttcaagtgactggtttctaacatgttaatattcatcattctctggactttcaaataactaatcatctgtaaacaaatagtaacatgaataggtatgagatgtgatatgaataattaccctgttaattttttttttttttttcctgagatggagtcttgctctgtcacccaggctggagtgccgtggcacaatcttggctcactgcaacctccttctcctgggtttaagccattctcctgcctc[214 bp omitted]tcttttagggacagtgtatctctttattgcccaggatgtagtgcagtgctgagatcatagctcactgcagtctaaaactcctgggctcaagccatccttctgcctcaggctccccagtagttgggactacaggcatgcactaccatgcccagccaatttttatgttttttgtagagatgtggtcttgctatgctgcttaggctggtctcgaactcctggcctcaagaaatcctcctgcctcagcctcccaaagtgttgggattacagacgtgagccaccgcacctggcccaccctgtgaattaaaaaaactgtttatttggacataattatagatttacagcaagttgcaaaaacagtacagggaggtcccaagcccttctgccagcttcccccagcagtcacatctgacatgatcatagtacgaggtcaaaacaggaaaatgacattggtacattccacctacctaattcagatttca[138 bp omitted]ggtgaaaccctgtctctacaaaaaaaatagaaaaaaccagccgggcatggtggcgggcgcctgtagtcccagctactcgggaggctgaggcaggagaatggtgtgaacctgggaggcggagcttgcagtgagccaagattgtgcaactgcactccagcctgggcaacagagcgagactcttgtctcaaaaaaaaaaattatttctatcagctgtttatggttattgatattattaagattttgtgattatctctctaggaccgcctgtattttcatcctacaacaacacgcttgattaaacatccttgcgagaaaaatatagcactatatctagggtaagtggcaattttatgtactgttaccttccttttaaattaaatctttagatttgccccattcattcgttcaacaaacagtaaagaagatggctctgccgtgtgttgctagttgctggcctgtagggagtccatagtcaggggctggaattggaggaagggaaatgaagagatcagccagtaactaaaacaactgcagtatagtgtggtaccacctgtcaaagatgcttggtataagcactgttgggatgcctcaggaaaaaatgcctaggaagtttccactggggagttgatgacaaaactgggttttgaaggatgaataggagttcactgggatggtgggagcaaccagatgtgtatgggcttagagcagagcattcaaaggaataaaaacaccatgcttagcatgcacgtgagttcgtaagggtagcaggttaggaaaccaggtatgtccaccatgccaggatgcttaccctcaccctgagggtagtggaggatgtggggctgcatgactcctgtttgtattcaagacatcagtctggcagcatcaaaaaggggactggaggccaggtgcagtgactcatgcctatagtaccagcactttgggaggccaaggcaggaggatcgctggaggatcgctggaagctaggaattcaagaccagcctgggaatatagcaagatcccagtatctacaaaaaaaaaaaaaaaaatacagaaaattagctgggggtgggccaggcgcagtggctaacctctgtaatcccagcactttgggaggc[134 bp omitted]gaggcaggagaatcacttgaaccc[142 bp omitted]tgcacctgtagtcccagctacttgggaggctgaggtaggaggtttacttgagcacaggagttcgagggggtacagtgagccatgagcacaccattgtaccccgtctggatgtctggatgacagagaccgtctctgtcatcaacagctcttttataaatcagccatgaccaattataaaacataattatggctgggaggctgaggcaggaggatcacttgagcccaggagttgaaaaccagcctggataacatagcaagacccatctctctctctctctctctttttttttttgagacagagtcttgttctgtcacccaggctgcaatgcagtggcgcaatctcggctcactgcaacctccgcctcctgggttccagcaattcttctgcctcagcctcctaagtagctgggactacaggtgtgcaccaccacgcctgactaatttttgtatttttagtaaagacagagtttttaccatgctggccaggctggtctcgaactcctgacctcaggtgatccacccacctgggtctcccaaagtgctgggattacaggcatgagccaccacacctggccatccatctctctctctctctcttttttaaaggctattatgagaaatgccattcatgatggcaacaaaaactttaaaaggaataggaattaactcagtaaatctttttttttttgagacaatgtttcactcttgtcgcccaggctggcgtgcagtggcatgatcttggctcactgcaacctctgcctcccaggttcaggcgattctcctgcctcagcctcccaagtagctgggattacaggtgtgcaccaccatgccaggctaatttttatgtgtgtttttagtagagatggggtttcaacatgttggccaggctggtctcgaactcttgacctcaggtgatctgcctgccttggcttccaaagtgctgggattacaggcatgagccatcacacctggccaactcagtaattcttttctgttgaaaaccataaaatttactggggagttggggaaggagatctggataatgaaatgatataccatgttcatggatggccttttcctatttaaaagtttcccatatgaaggaacaaattgtttatttcttatatacacattcctggtctaaaactatttacgttagtggaactagagccatataaattataaaactgaagtccatcctgccactcaatgtacattttatatagttttatatttgatgtattcacacatttaaactattatttctggaagtcaaacacctggactgtagaggtttatttatgcaaaataagtaaattatatctaaatgactcctggttacaatacaaattttgtttgaatggagacattttagagtacctctattgtcttttttctttccttgtgtgacattatcctaatttaacttatttattgtttatttcaggaaacaagtttttttcacaatggataactttgagactagtctccttccatttaccatccctacatcaatgcaggtagttattttactgagtgatctgaaggatgctagtataagtaatatttgggggaaaatacagttcagaaatatcagactggtctgtttttattagtttagaggtttattttacaatgtacctcttcaagacattaagggcaatttctaagcctaaagaagggctggttttattctgcccctactaccaaaatagactttctattcctgaaaaagaaaaaaagagtggatgtaggtcctcttccttacattggttatattataaatagatagatgggatggtatcttactttatatgcagtaatttcaagacctcccttggtcaggtaagtggctcacacctgtaatcccagcactttgggaggc[134 bp omitted]gaggcaggagaatcactcgaacccaggaggtggaggttgtagtggcctgagatcgaggcactgcactccagcctgggcaacagagggagactctgtcttaaaaaataataataaaataaaataaataaataaataatagataggtgggatggtatcttactttacatgcagtaatttcaagactccctcagtcaggtacagtggctgatgcctgtaatccctgcacattgattggccaagacagga[144 bp omitted]actaaaaatacaaaaaaattagctgggcgtggtggcaggtgcttgtagtcgcagctacttgggaggctgaggcaggagaatggcttgaacttgggaggcggagcttgcagtgagccgagatcgcgccactgcactccaaccccagctattcgggaggctgaggcaggagaatggcatgaacccaggaggcggagcttgtagtgagccgtgatcgcaccactgcactccagcctgggtgacagagcgagactccgtctcaaaaaaaaaaaaaaaaagagccccccaaattgtcctaaaccaaagcacacccttagtgaatatttgagaaattataccatcgacacctatgctaaataaagttttgggctggacatggtggttcacgcctgtaaccccagcactttaagaggctgaggtgggcagattgcttgaccctaggagttcaggactacccagggcaacacaacgaaactccaactctatatgaaattagccgagtgtggtggtgtggtggtgtggtggtgcgtgcctgttgttccagcaactcaggagcctgaggtgggaagattgcttgagccgggagctagaggttgcagtgagctatgattgtgccaccgcactccagcttgagtggcagcttgagactatctcaaaataaataaataaaaataaagttttgtcaattatcgaaaataccaatatttctcctaaaagcgacacttaacagttttttttttttttttttttttttttgagacggagtctcgctctgtcacccaggccggactgcggactgcagtggcgcaatctcggctcactgcaagctccgcttcccgggttcacgccattctcctgcctc[168 bp omitted]caccgcgcccggcctacttaacagttaatgctagtcattcatcatttatactttaggctttgtcatccaagaaggttttgttttgttttgttttgtttgtttatttgattttgtggtttttgttttttgagatggagtctccctctgtcacccaggctggagggcagtggcacgatctcagctcattgcaacctccacctcctgggttcaagcgattctcctgcctcagcctcctgagtagctggaattacccccaaaattagccaccacgcctggctaatttttgtattttttagtagagacagtgtttcactatgttggccagactggtctcaaactcctgacctcaggtgatccgtcttgttctcccagagtgctaggattacaggcatgagccaccacgcccagcttcagggaaggtttttataaaggaagaggagatggaatgaattgaggtatctcagggcacccaagaccagcttcaacttggttctagctggccccaagatacacagttctcagtatctaagaaccaaccaactattgctggcatacatggtgttttttgtttgtttgtttttgttttttttgagacggagtctcactctgtcgcctaggctggagtgcagtggcgtgatctcagctcactgcaacctccacctcccgagttcacaccattctcctccctc[135 bp omitted]gtttttggtttttgagaccgagtctctgtcacccaggctggagtgcagtggtgcaatctcggctcactgcaacctctgcctcctgggttcaagcgattctcgtgcctcagactcctgagtaactgggattacaggcaggcaccaccatgcctagctaatttttttgtatttttagtagagatggggttttgttatgttggccagctggtattgaactcttaaccttgagtgatccgcctgccttggcttcctgaagtgttggtattacaggcgtgagccaccatgctcggccataaatgttttttttcttttctttctttttcttttttttttcaagacggagtttcacccttgttgcccaagctgtagtgcaatctcggctcaccgcaacctccacctcctgggttcaagcaattctcctgtctcagcctcccgagtagctgggactataggcacctgccaccatactcagctaatttttgtatttttaatagaggcagggtttcaccatgttggccaggctggtcttgaaatcctcacctcaggtgattcacctgccttggcctcccaaaatgctgggattataggtgtaagccactgcgcctggtctctttctttttctttttctttctttctttctttctttctttcctttctttctttcttccttccttccctccttccttccttccctccctctctgcctccttccttcctttcttctccttccttccttccttccttcctcctttctttctttctttctctctctctctatttcttttctttctttctttcccagagttttgctcttgtcaccaggctggagtgacccagtctcagctcactgcaacctccacctcctaggatcaagcgattctcctgcctcagcctctcaagtagctcggattacaggcacctgctgccacaactggctaattttcgtatttttagtagagacggggtttcactatgttggccaggctggtctcaaactcctgacctcggtgatctacccgccttggcctcccaaagtgctgggattacaagcgagggccaccgcgcccgtccatacattttttttttttcaatgcatgtctagaagtctgcgtttctgaatcaatgtttgaaaagatgctctcattgatatcatccatatgataacttttaggtcggcgtaccagaagtgacatcagcacattttgctggttcgttattgctgttagtagtggatcaaaaagtctatatttatgattatgaaaataattcttggagcatgtctttaggtatgtacattttgtatttttaaattttgtttgagtgtagtcaacatgagagaagagggtattagtgttggaagtataagcgatgctcctacttggatgtcaaccccaggacattactttgtcctttccaaccaaaatgaaaattggcctgagtccccatccgtagactgggaacctagtgttcccatcatggattgtagtcacaagccacaaaagctacttgggcttattgaaacaaacaagaggcattggccgggtgcgctggctcacgcctgtgatcccagcaatttgggagtctgcggtaggcagatcatctgaggtcaggagttcgagaccagcctgaccaa[134 bp omitted]aacatggggaaaccccgtccctactaaaaatacaaaattagctgggcgtggtggtgcatgcctgtaatcccagctactcgggaggctgaggcaggagaatcgcttgaacctgggaggtggaggttgcggtgagccgagattgtgccactgcattccagcctgggcaacaagagcaaaactctgtctcaaaaaaaaaaaaattagctgggtgtggtggtgtgtgcctgtaatcccagcttactctggagcccgaggcaggaggatcccttgagcccaggaagtggaggttgcagtgagctgagattgggccactgcaccccagcctggatgacagagtgagactctgtctaaaaaaaaaaaaaaatcgagggacatcagcgggtcttggtgatggactggtgtccggggaggaccagggaaaactgaggatgaccagtagatgtctggtaaccaagctggattatgagcattgtccctcccacacacttctcacgagggctaggggacggtagagaaggtgagctttatgaagagggagaaagatgaggactctgatgcaggaggaaagaggatgtgaaaagtgaagatgaggcaaatgttagctttagaaaagaagaggatcgcctgagcccaggagttcaagtccaccctaggcaacagagcagaatgccatctttacaaaaaaccttacttttctttttctggagacagagtctcactcggtcacccaggctggagtacagtggcccagtcttggctcactgcaacctctgcctcctgggttcaagcgattctcctgccttagcttcctgagtagctggggtcacaggcacccgccaccacgcctggctaattttttgtttgttagtttgttttgagatggagtttcgctgttgttgcccaggctggagtgcgatcgcacgatctcagctcattgcaccctctgcctctcgggttcaagcgattctcctgccttaccctcccgagtagctgggattacaggcatgtgccaccacgcccagctaattttttttttttttttgacggagtctcgctctgtcactaggatggagtgcagtggcacaatctcggctcactgcaacctccacctcccaggttcaagtgatcctcctgcctcagcctcccgagtagctaggactacaggcgtgtgccaccacacccagctaatttttgtatgtttttagtatagatggggttc[142 bp omitted]gtcacccaggctggatggcgtgcagtggcgcgatctcggctcactgcaagctccgcctcctgggttcatgccattcttctgcctcagcctcttgagtagctgggactacaggcacctgccaccatgcctagctaattttttgtatttttagtagagatggggtttcacggtgttagccaggatggtcttgatctgacctcatgatccgcccgcttcagcctcccaaagtgctgggattacaggcataagccactgtgcccggcctaattttgtatttttaatagagacagggtttctccattttggccaggctggtcttgaactcccgacctcaggagatccgcccacctctgcctcccaaagtgctaggattacaggtgtgaaccaccgagtcgggccaactgggggcagttctgtcccccaagaggacacttggcaatgtctggagacatttttggtgtcaagactagaggaaggtgctactggcattgagtggtgggtagagatacagatgctaaaaagcatcctacaatgcataggaaactcctcgcaagtgagaaccatctgctcccaaatttcagtagtgttgagg[144 bp omitted]tctactaaaaatgcaaaaattagccaggcatggtggtgggcacctgtaattccagcttgagaggctgaggcaggagaatcgtttgaacctgggaggtggaggtggcagtgagccaccactgcactctagcctagacgacagagattgcaccactggcactccagcctggatgacagagggggactct[142 bp omitted]aaaccctgtctctactaaaaatacaaaaaattagccgggcgtggtggtgggtgcctgtagtcccagctactcaggaggctgaggcaggagaatggcatgaacccgggaggtggagcttgcagtgagccaggatcacgccactgcacttcagcctgggcgacagagcaagactctgtctcaaaaacaaaacaaaaaacaaaaaacttttctccaaacttcagggaactcataaacatttcaaaattatattttcctttcaggtataaaacaccctgttacacatgtctctggtgataattgttgttatactggaagtttgttttgtgtggtaagtataagtgtataattgttcatttttttttgctctcctct[132 bp omitted]gaaaccccatctctacaaaacaataaaataattagcttggtgtggtgacatgtgcctgtagtcccagccacagcaggaggattgcttgagcccaggagatcgaggctgcaatgagccgtgattacaccactgcactccagcctgggcaactagcaagactctgtcaaaaaaaaaaaaaaaaaaaaagactgggcatggtggctcatgcctgtagtaatctagcattttgggaggccgaggtggaatcacctgaggccaggagctcgagaccagcctggccaacatggcaaaaccctgtctctactaaaaatacaaaaaattagccaggcatggtggcgtgtgcctgtaatcccagctactcaggaggctgaggcaggagaatcccttgagcctgggaggcggaggctgcagcgagctgagattgcaccattgcactccagcctgggcaacaagagtgaaactccatctcaaaaaaaaaaaaaagaaaaaagataaagaaataaggacagtgtaaggcttgagactgggtctcaagaacttggtcagtgttatttcccatgggctcagagcacagttgggagatggaaaaggttttggggacgttttcagatccaccggctgacactataaatacatccatctatagttgacctttgaacaacgtataggttagaggtaccaccctccaccccacacagttgaaaatccacaggtaactttcgacttccccaaaacttaattactgtccaggcgtggtggttcatgcctgtaatcccagcagtttgggaggctg[133 bp omitted]gctaatatgggcaacatggtgagaccttgtctctactcaaaatacaaaaaaaaaaaaaaaaaagaaaagaaaaaaatagctagatatggtggtgagcacctatagtcccagttactcaggtcgctggggtgggaggatggcttgagcccagaaggcgcaggttatagtgagctgagatcatgccactgcactcggctggggcaatagagccagaacttgtctcgaaacaaaaacaaaccaaaaaacaaacttaattactaatagcctactgttgcctggaagcctcactaataacataaacagtctatgactgtcacccagggtagagtgcagtggcgcaatctcggctcattgcaacctccgcctcccaggcttcagtgattcccctggctcagcctcctgagtagctgggactacaggtacacagcaccacgcctggctaatttttagtacaggtggggtttcaccatg[135 bp omitted]gacagggtttcattatgttggtcaggctggtcttgaactcctggcgtcaactgatccgcccgcctcagcctcccaaagtgctgggattacagttgtgagccaccacgcccagcctaactttggtattttttaggagagatggggtttcattatgttggccaag[137 bp omitted]cagacatccaggtttttttcagtcatgagttttcatttctctgggataaacgttcaggaacgtacttgctggcatctttctttcattctttctttcttttttttttttatagcatgtcagtaatttggtttttgcatatttccgtggagatcagatatcccagacttatatatattattcaaatactgggggattcagtttttggaagtatcactatgacagacaggtatgttaaatttggtaagaatgtgaaaataaatacatatgtaccttgtgattgtagtaattgctgtcaatgggtgcgtgagggtgttttcctctttaagagtccaactgggacaggagtggtggctcatgcctgtaatcccagcactttgggaggctgaggcaggaggatagcttgagcccaggagtttgagaccggcctgggtgacatggcaagaccccatctctacaaaaaataaaaaaaataaataaattagtcaggtgtggtggcgtgtgttttagtcctagctacttggaaggctgaggtgggagggtcactggagtctgggagattgaggctgtggtgactatgatcacagctctgctctccagcttgagtgacagagcgagacctcatctcaaaaaaaaaaaaaaagtccactggctgggaggttagggaaaattccaggtcaatggagccagctcaggagcctaggaagttagagacaaaaagttttaggtcaggcaaaatcatggcaccatttatgccatttaagtagtacttataaaaagctagtgacaggccaggtgcggtgcctcacgcatgtaatctgagcactttgggaggccgaggtgggcagatcacctgaggttgggagttcaagaccagcctgactaacatggagaaaccccgtctctactaaaagtacaaaatgggctgggcgtggtggcacatgcttgtaatctcagctactcgggaggctgaggcaggagaatcgcttgaacccgggaggcagaggttgcggtgagccaagatcacaccattgcactccagcctgggcaacaagagcaaaacagtgtctcaaaaaaataaaataaaataaaataagctgggcgcagtggctcacgcctgtaattccagcaatttgggaggccgaggtgggtggatcacctgaggtcaggagttcgagaccagcctgaccaacatggagaaaccccatctctactaaaaatacaaaattagctgggcgtggtgcctcatgcctgtaatcccagctacccgggaggctgaggccggagaatcacttgaacccaggaggcggaggttgcagtgagccgagatcgcaccagtgcactccagcctgggcaacaagagcgaaactccatctcaaaataaataaataaaataaaatacaaaaactggctgggtgtattggcggacgcctgtaatcccagctatcgggaggctgaggcaggagaatcgcttgaacccgggaggcagaagttgcttgagccaagattgcggcactgcactccagcctgggcaacagagaaactccgtctcaaaaaaaaaaaaaaaaaaaaaaaagctagcgcccagccgtgtagggacatggtggctcacacttgtaaccccagcactttgggaggctgaagcaggtggatcgcttgagtccagtagttaaataccagcctgggcaatacggggaaaccctgtctctaccaaaaatataacaattagccgggcatggtggtgcatgcctgtagtctcagctacttgggaggctgaggcaggaggattgtttgagcctgggatgtggaggttgcagtgagctgagacaacgccattgcactgcagtctggatgacagagtgagaccctgtcttaaaaaaaagaaaagaaaagaaaaaagctaatgccctagtaaaggcaacacattaacttatgacacacccacatgcccacctgaagattggtactatcaggttcatcatcatgctcactttacagatgagaaaactgtagcgggttgaaccaatgtccccccaaaatttatgtcaacctggaacttcagactctaactgtctttggcatttttgctgctgtaacaaaatatctgagaccgagtaatttataaggaacagaagtttacttgtcatggttctggaggttgggaagtccaagatcaagacgccagcaaggttgttttctggtgaaggctgcaatctgctcccaagatggtgcctatgttggggggtcctctggaggggcaagagccacgtcctcacacagcagaaggcagaagaaccaacgaacagtgctctcttcaacgtagagctcttttataaggatgctcatcccaaagaccatacattgatagtacattggggatttcagcatgaattttggaggggaaaccatcattcaaaccatagcaggaaactgacttggaagtagggcctttgcagatgtaatcagttaagctagaatgaggtcacattgaaatcaggtggccttcaaatcaaatgaccgctgtccaggcgcggtgcctcagcctgtaatcccagcactttgggatgctgaaggcgggggggggggggtggtgtggatcacttgaggtcaggagttcaagaccagccaagccaacttggtgaaaccccgtctctactgaaaaatgcaaaaattagctgggtgtggcggctggcgtgcctgtaatcccagctacttgggaggctgaggcaggcgagtcacttgaacttgggaggtggaggaggttgcagtaagcccagatcgtgccactgcactccagcctgggtgacagagtgaaactctgtctcaaggaaaaaaaaaaagaacaaacaaaaaaaacaaaaaaggaaacctagcatcactaaaattcccaattattactaaaatagcgtttgtgtgtgcgtgtgtgcgcgtgtgtacgtgtgtgaacgtgtgtgtgcgtgtgtgtatgtatgtgaacgtgtgtgcgtgtacatgtgtgcatgtgtgtacatgtgtgtgcgtgtgtgtacgtatgtgaatgtgtgtgggtgtgcgtgtgcatgtgtgtacgtgtgtgtgcgtgtgtacgtatgtgaatgtgtgtgtgggtgtgcgtgtgcatgtgtgtacatgtgtgtgtgtgcatgtatgtttgtgcgtgtggcagtggaattgtttttatcacggacatttcaagaggagaggttaccgcagagaatagttgagctctcagcactgctacagccaggacaagagtcagc[131 bp omitted]tgagacccaccccccaccatatctacaaaaaattgaaaaagaaatgagctgggaatggtggtaggtacctgtggtcccagctactcagggggctggaggattgcttgagcctgggagactgacgctacagtggggtgtgatcgtgccactgcactctagcctgggggacggagagatatcctgttgcaaaaaaagaaaaagaaaagaaactggttggagtgatggagcaggatctagagtcccttccaggggcagatggatcccataattgcctaatgggataggtggagggagggtcttgaaggcaggtagaataatagacccccaaaggtgtccacatcctaattcctggaacctgtgaatatggttcctgacatggcaa[134 bp omitted]atggtgaaacctcatctctactaaaaatacagaaaattagccaggtgtggtggcaggcgcctgtaatcccagctactcgggaggctgaggcaggagaatcgattgaacccaggaggcggaggttgcagtgagctgagatcacaccattgcactccagcctgggcgacaagagtgtaactctgtctcaaaaacaaacaaggccaggcactgtggctgatggctgtaatcccagcactttgggaggccgaggtgggcggatcacctgaggtcaggagtttgagaccagcctggccaacatggcgaaaccccgtttctactaaaaaaacagaaattagccaaatatggtggcaggtgcctgtagtcccagctacttgagatggggaggcagggaggattgcttgaacccaggagacagaggttgcagtgagccgaggctgtgccactgcactccagcctgggcaacagagtgagactccatctcaaaaaaagaaaaaaagaaaaaagatagcagtcttagtctctctgtctctgtctctctctctctctcttcctctctctctctcttcctctctctctctctctctctctctgtctctgtctctgtctctgtctctgcaagatgtgggaggtagccagctgggctgctatggaaatctgtctcactatccctaggtggggcccttgattcctgttccaagtcagctgctagacactttgctgtccagctaacaatcaggaatgaggactcccaggcaggaatgaaagactcaggcagccttctagcagtctgggtcatatcattttctccaaacacccaaaccaaagctgtcttctttcaagtttttgccccaagtgtcacatttcttttcttttcttttttgagacaaggtctcactctgtcacccatgctggagggcagtggcatgattgtggctcactgcaacctctgcctcccgggttcaagtgattctcctgcctcagcctcctgagtagctgggattacaggcgcctaccaccacacccggctaatttttgtatttttagtagagatggggtttcaccatgttgaccaggctggtctcgaactgctgacctcaggtgatccacccgcctcagccacccaaagtgctgggatgacaggcgtgaaccaccgcacccaattgagtgccatatttccacagagggcattatttgtttttctaaaaaagactttccttcattgtaacttattagataatctgaagttaaaccgacaaacacatgtgtattaagatttattcatctgaagtcttttctgtttgtttcataggcagaaatcattgggtctttaggcggaatcttccactttttttctttgtcacaggttgcgatgcttgtagtgaatcaagggaaggtaagtaactgcagagggaagaactactcagaggacctttgcccaagcccaggtttttgttacaactcgcacatttttaaacatttatttatttatttaatttttttttagacagagtctcgctctgtcagccaggccggagtgcagtggcgcaatctcagctcactgcaacctccacctttcaacttcaagcaattctcctgcctcagcctcccgagtagctgggactatgggctcgtgccaccgcgcctggctaatttttgtatttttagtagagatagggtttcaccatgttggccaggctggtctcgaactcctgagctcaagtgatccacccaccttggcctcccaaaggcctgggattacaggtgtaagccacggcgcccggcatcgataatgtatttttgtttaaccattttaaaatagtatcttttctttttttatttatgtgagactgattctcactgtgtcacccaggctggagtgcagtggtgtaatctgggctcactgcaacctctgcctcccgggctcaagtgattcttgtgcttcagcctcctgaatagctgggattacaggtgcctgccaccatgcccaggtaatttttgtattttcagtagtgacagggtttcaccatattggccaggctggtctcaaactcctgacctcaagtaacccccaccctccgccgccgcggcctcccccagtgctgagattacaggtgtgagccactgcgcctggcccaatggtaccatttcagtatgtaatcaatataaacaactcatggatgagatagtttacatttttctgtactacatcttcaaaatgaggccgggtgcagtggctcacgcctgtaatcctagcactttggaagtccgaggcgggcagatcatttggggtcaggagtttgaaaccagcctggccaagatggtgaaaccccgtctctgctaaaaacacaaaaaaattagcccggcacggtgtcaggcacctgtaatcacagctacttgggaggctgaggcaggagaatcacttggacctgggagatggaggtggcagtgagccgagatcgtgccactgcactccagcctgggcaacagagccagactccacctcaaaaataaaataaaataaaataaaataaatcttcaaaatgcattgtgcatttgacacttagagtaattctctattcagaactaaattttcaatggttaaactgaaatgtaaccctagcaaaacaataaagttgtatttaataaaaataaaaaaagaaaggcagacttgtggcttctttgctttctttgctttcccctgcacctgctagccagactcctcttccctcattaggactcagtgggactccacagtagggtttggggagaggctgaatggtgtctttttctcccagggcatgttcaagtactcagatcaccccctcaaccggagtttcgggctgtcttttgactataatgggactctagacatcctcatcgcccccggccagagaggcatcctgctcctatggtttgagaacagcctgttgttttcccataatgcaggtgagcccaggggcccagggtggggctgccgcctggtggcctcctccagaggggccgagtacagcctggataaggggaggggaaggagcaacccctcgaccactcggttattttttctcttccatgttcagagtggaccacaagcccataatcatttagtggatctctctgcatcctccctagcttcctggcttgcaggatacttagggccaggtagacagtgacaactgaaataagtgacggtgacaagagtctccgtcatggaggtttattccgccagctttaggtcgcgtctgggaaaaacgccagtcagacaactctgaggctgcttttccagagttccaggaggcttcgtatttaacatttctttctcttttttttttgagacggagtctcactctgtcgcccaggctagagtgcagtggcgcgatcttggcccactgcaagctccgcctcccgggttcacaccattctctggcttcagc[224 bp omitted]ggagactttagttcatgcacagtaaagttcctgtttttcttttttttttggagacagtgtctcactctgtggaggcggaagctgtgccgagtcctgattgtacttctgcacccaggctggaatgcagtggtgcaatcatggctcactgcagcctccaccttccctgggctcaaacgatcctcccatctcagcctcccaagtagctggctacaggcatgtgccaccatgcctggctgatttttttgtattttttgtagagactgggtcctcctgtgttgcccaggctggtctcaaactcctggcttcaagcaatcctcctgccttggcctcccgaagtctggatattacagctctgagccgctgtactcaacctgttttatcctcacaatggtttccctttttttttttttttttttttgggacacagtttcactctgtcatcgagactggagtgcaatggtgcaatcgtggctcactgcagcctccccacctctcaggctcaagtgatcctcctgcttcagcctcccagtaactgggactacaggtgcgccaccatgcataactaacttattttttgtagagacggggtttcaccctgttgcccgggctggtctcaaactcctgggttcaagcaatcctctggcctcagcctcccaaagttctgggattacagatgagagccaccaaacccggcctgttttattccttatagtggtcacctgtattagaagacattccattgtgttcaagcccctggttgacaaaaaactcaatggccatccctctgagcttgcttatagagaagattaacggggatctggttttcttttttcttttcttttttttttttttttttttgagatggagtctggctctgtcgcccaggctggagtacagtggcgcaatctcggctcactgcaacctccacctctgggttcaagcaattctcctgcctcagtctcccaagtagctgggattacaggtgcgtgcaaccatgctcagttaatttttgtatttttagtagagacaaggttttgccatgttggccagcctgatctcgaactcctgacttcaagcgatctgcccacctcagcctcccaaagtactgggattacaggtgtgcacccccgcgcctggcagaagggttaggttttcttaaaccgaagcatattccttgtcatgcttaacaaaattgtgtttcagtgctgtattctccttgattcattctcctttgaatagcaaacctctcaaaagctataaggaacatcgaaagagccactggccgggtgggttgggtggtggcaggggtggctgtggtcccagtagtagacatcccctttcccaggatgtacacggggcctcatgcacctgtcctgttacctcctaggtcagctcgtcgacaccgtccgggtgaaaaaaggagaccagaccttgttttcttccatttttgaagccaagatcaccatccacaacattgctgtcagtgcgtagccgacccactgctagccaagaaatatttagacctggcttattaaccgtaggcctgccagacccaa[134 bp omitted]tctactaaaaatacaaaaataagctgggcgtggtggtgggcgactataatcccagctactcaggaggctgaggcaggagaatcgctggaacccgggaggtggagtgagcagtgagcagatcgcaccatggcactccagcctgggcgacacagtgagactccaaaaaaaaaaaaaaaaaaagcttcaactctgtatttttttcatattgcttggcatttccacatgaattttgtgattataaccagaaaatagctgtcatattattcttttttttttttttttttttgagatggagtttcaatcttgttacccaggctggagtagtggcgtgatctctgctcagtgtaacctctgcctcctgggttaaatgattctcctgcctcagcctcctgagtagctgggactacaggcgcgcaccaccatgcccggctcatttttgtatttttagtagaaaaagaggattcaccatgttggccaggctggtctcaaactcctggcctcaagtgatccacccccctcggcctctcaaagtgttggaattacaggcgtgagccactgcacccaaccacacttatgtttttgtccacagaaatgaccagcatttcaatttttgttttgtcttgttttgtttttcccagctgaaaatgaactggcagttataactcgggaggataatttgtattatggcaatctgggcatcgtgccaagttccataatcaaagtaggtaaaaagaaagtggggttatgggctgggcacggtggttcacgcctgtcatcccagcactttgggaggctgaggtggaaggatcacctgaggtcaggagttcaagaccagccttgccaacatggtgaaaccctgtctctactaaaaatacaaaaattagccgagcctggtggtgggcacctgtaattccagttacacgggaggctgaggcaggagaatcgcttgagcctggaaggcagagtaagactctgtctcaacaacaacaacgacaacagaaagtggggttatgaattagttggtaaggaataatggtcttgttcacaaacttctgaaccttttttcgaaggctagaaatcactctagttagtaaaacaacaacaacaacagcagctaaaaggggaagagtatttaaaatactataggtgctggtctaggcaccttcgtgtattacattatttaaccttgaccatcatcttaggaagctcctcatatcgtccctatttgacagatggaaaaactgaggcacagagacctaagtcgtctgtccaggctcaaagtggtactaagtggtggtgcaggtgtcatctgacatcctcttgtgcattatgcctatctaattttttttttttttttttgagatggagtctcactctgtcgcctagcttggaatgccacagcacaatcttggctcactacaacctccacctctcaggttcaagcaattctcctgcctcagcctcccgagtagctgggattacaggcgcatgccaccacaccaggctaagttttgtaattttagtggagtcagggtttcaccatattgtccaggctggtcttcaactcctgacctcaggtgatccacccgcctaggcctcccaaagtgctgggattacagtcgtgagccaccgcgcccggccgaaactctgtttcttaaaaataataataaaactaacaaaaatttaaaataaaagaattattttggccgggcgtggtggctcacgcctgtaatcccagcaccttgggtggccaaggtgggcggatcacgagttcaggagatcgtgaccatcctggctaacacggtgaaaccccgtctctactaaaaaaaatacgaaaaaattagccgggcgtggtggcggcacctgtagtcccagctactcgggaggctgaggcaggagaatggcgtgaatccaggaggcg[140 bp omitted]tggttccaggagttcatgaccagcatgggcaacatagtgagaccccgtctctactaaaaatatgaaaattagctgggcatggtggtgcatgcctgtaatcccagctactcgtgaggcaggagaatggcttgaacccgggagacggaggttgcagtgagccgagatcgtgccactgcactccagcctgggcgacagagtgaggctccatctcaaaaaaagaaaaaaataataattaccaaaggatgaatgaagctgaagagaagttagatcacaagttgtccttatgactgtgtttcctccctcccccagccctctctcccttctttcctttcttccttcctttctctttctctcttcctttctcttttctttttctttcttccctctaccttctttcaatctgcatcatggccgggcgtggtggctcatgcctgtaatcccagcacttttgggaggccgaggcaggtggatcacgaggtcaggagttcaagaccagcctgatcaacatggtgaaactcgtctctactaaaaatacaaaaattagccgggcatggtggtgcgactgtgatcccagtgactcaggagaatcgcttgaacccgggaggcggaggttgccgtgggctgagattgcgccactgcactccagcccaggcgacagaacaagattccgtctcaaa[132 bp omitted]gctaacacagtgaaaccctgtccctactaaaaaatacaaagaaaaaaaaaattagccgggtgtggtggctgcgcgtctgtagtcccagctactcgggaggctgaggcaggagaatggcgtgaacccgggaggcggagcttgcagtgaaccgagatggcgccactgcactccagcctgggagacagagtgagactccatcaaaaaaaaaaaaaaaaaaaaaaaaaaaaaaaaaaaaatctgcatcatgaaataaaatttaaacctccagaaaaacaattacaatgattagatctcaggaatcattttcttcttagtttgcagaccaatacatctggtcagaagacgtggccctgatgttcaggagcccagggactctggaaatactgaccccactgcgtgacacagcctttccagcttttgatttccagaagtgcctcgtgaatatccaggcgcttctcatggaccctgaactccacgttggaaagtgcaaggtatgtgatcctaactgttttgatcaatgttcaatgtagtttttaaagacaaattcaacctgggcatggtggtgcacgcctgtagccccagttgctcaggaggctgaggctggagggttgtttgaggccaggagttcaagaccagcctgggcaacatacacccatttctaaaacaaaaaaaaatttttttttaaagctgggcgttggccaggtacggtgggagactttggagactgagtctttgggagactgaggcaggtggatcacttgaggtcaggagttccagaccagcctggccaacatggtgacaccccatctctactaaaaatacgaaaattagcttggtgtggtggcgggcgcctgtaatcccacctacttcgagtgctgaggcatgagaatctctttaacctgggaggcagaggttgcaatgagccgagatcacaccactgcactccagcctgggtgacagagcgagacttcgtctcaaataataaataaataaataaataagttgggcatggtggtgtgtactctcagttacttgggaggctgaggtgtggggatcacttgagcccaggagttcgaggctgcagtgagctatgatggagtcactgcactccagcctgggtgacaaaatgagatcctcgtttctaaaacactaatttaaaaaaagagaaattaacaaaataagagacaacaagatagtattcgtcaccaataagagatcaatcacatcacccattgaccactgccaacacgatcaaactcaatctcatgaggcaagcatcaatccagctgcaaatttgccagaaatacaaaagacagaggaatgggttcacctgcaccagggaaatccagattttgagaaatgctgcgggcccaacagcgtggggacttccaaaatccatggaaaggaaaagggggccgggcgtggtggctcattcctgtaatcctaacactttgggaggccgaggcgggcggatcacctgaggtcaggggttcgagagcagcctggccaacatggcgaaaccccgtctctactaaaaatacaaaaattagatgggcgtgctggcacatgcttgtaatcccagctactcaggaggctgaggcaggagaatcgcttgaacctgggaggcagaggttgcagtgagccgaaaccaagccactgcactccagcctgggtgatggagtgagactccatgtcaaaaaaaaaaaaaaaaagtagattttgtagagacaggagtctccctgtgtggtccaggttggtctcaaacccctgaacttaagtgattctctacccctcaggattacaggtgtgagccactaaacccagccaacaaacctgtagattgaaagaggattaaaagacatacctgtgttgggaaacgggcaagactgagtgatgatcttcagatgcatactagggcagctctactctaaagaaacagaaagagggggcgggcgcggtggctcacgcctgtaatcccagcgctttgggaggctaaggtgggtggatcacaaggtcaggagatcgagaccttcctggctaacagtgaaaccccatctctaccaaaaatacaaaaaaaaaattagctgggcgtggtggtgggcgcctatagtctcagctacttgggagactgaggcaggagaatggcatgaaccccggaggcagagcttgcagtgagccgagattacgccactgcaccccaacctgggcgacagagccagactctgtctcaaaaaaaaaaaaagaaacagaaagaggtcaggcgcagtggctcacaactgtaacctcaagcactttgggaggccgagatgggaggatcacttgtgcccaggaatttgggaccagcgtggcaacatagtaagcccttgtctctattaaaaaaaaaaaattgaattagccgggcatggtggtgcacgcctgtagtcctggctacttgggaggctgagggaa[134 bp omitted]gtcagggttggggaatacttctggagaggagggaggggctggcattgtgcccatctcgagacccttctggaaatacagagtctagtggggaagacagaggcacaagtggagattcaggctgcaggaccaggagggtcccttcctccttcccacctccttgccctttctttatgggaacaggagcatgattatctttcttcttcgcctttttaactagatagagtttctgacaggagaatttatatacaggatgtataccattgacatgcacagccagctggaattgactgcttcgttgataccccagccaggcacatccctgattcctctggtaagtacatcttaatgtttctgctatctgggattctcagccacatgcctggtgcccactcccagattctggaaatcccctggcatcccccacaagga[131 bp omitted]tgcagcctccacctcctgggctcaagcaattctcctgcctcagcctcccgagtagctgggattaccagcatgtgccaccacgcctggctaattttgtatttttagtggagacggggttcccccatgttggtcaggctggtcttgaactcctggtctcaagtgatctgctcacctcggactcccaaaatgttggggttacaggcatgagccaccatgcccagccatttctatgtgtcttccccctcgacgtgcctctgcatgtctgggcgtgatgaggctgtggctgtccagctggccgcctggccgcccttgtgctgtctctgtgcctcctccatccttctgagctgcccatacattcattttcttcttcttctttttttttttttttgagacagagttttgctctgtcgcccaggctggagtgcaatggcacgatctcggctcactgtaacctctgcctcccgggttcaagccattctcctgcctcagcctcccaagtagctgggattacaggtgcctgccatcatgcctggctaagttttgtatttttagtaagatggggttttgccatgtt[135 bp omitted]agctaagagccctgacccctatggccttcccccacccagcaggaagtgtttggatgtttctcgatccaaaatccaagtgtctaagcctaggcattagctgcaagtacagatggtcccacaattttttgactttacaatggcacaaaaccgattatactcagactattgagtattatactcaatatattatactcaaaatattgagtatacaaaaactattatactcaatagaaactgtatttccagtactgatacagcctttctgtttttcactattagtatagtattcaataaattacatgagggccgggcgcggtggctcccgcccgtaatttcagtacttcaggaggctgaggtgggaagatcgcttgaacccaggagctcgagactagcctgggcaacatagtgagactccatctgtacaaaaaacataaaaattattagccgggtgtggtggcgcatgcctgtaatcccagctactggagaggctgaggcaggagaatctcttgaacccaggaggcggaggttgcggtgagccaagatcgtgccattgcactccagcctgggcaacaagagcgagactctgtctcaataaataaataaataaataaataaaaataaattaaaaaaataaaaattagccaggtgtagtggcatgcacctgtagtcccagctacttggggctaaggcaggaggctgaggcaggaggatcacttgagcccaggaggttgaggctgcagtgagctatactcatgccattgcactccagcctg[140 bp omitted]atagtgaaaccccatttctactaaaaatacaaaaattagccgggtgtggtggcacatgcctgtaatccccgctactcaggaggctgacgtgggagaatcacttgaatctgggaggtggaggttgcagtgagctgagaccatgccactgcactctagcctgggtgacagagtgagactccctctcaaagaaaaaaaaaaattaaataaataaataaaaataaaaaatttaaaagtaggtaaattattgcttcatgaggacagagtttccatttgggactatgcgaaagttttggaaacagatggcagtgatggttgcacgatattgtgaatctaccgaaagccactgaattatacactaaaggtgggtaaattcatccacatgtattatctatttgtacaaacattcaggaaagctggacccctgaaatgtcaacatcgtgatccaaggggtggaagggcgagtgggttttgttctccttttagtattgcttggtttattctcaatttaaagtaggctgggctaacttccaatgcttg[131 bp omitted]tgaaacctcgtctctactaaaaacacaaaaattagctgggtgtggtagcgtgcttggaatcccagctactcgggaggctgacacatgagaatcgcttgaacccaggaggcagaggttgcagtgagccaagatctcaccactgcactgcagcct[140 bp omitted]tggccaatatggtgaaaccccatctctgctaaaaatacaaaaattagctgggtgtgttggcgcatgcctgtaatcccaactacttgggaggctgaagtaagagaatcactggaacccaggaggcagaggttgcagtgagctgagtttgcaggactgcactccagcctgggtgacagagtgagactccatctcaaaaataaagaaagaaagaaaataataaataaatgcattttcaacttctttttttttttttttttgagacggaatcttgctcttgttacccaggcgggagtacaatggcgtgatctcagctcaccgcaacttttgcctcctgggttcaagcgattctcttgcctcgggctcccgagtagctgggattacaggcatgcaccaccatgcctggctaattttgtatttttagtagagatggggtttctccatgttggtcaggctggtctcaaactcccgacctcaggtgatccacctgcctcggcctcccaaagtgctggaagtacaggcgtgagccaccgcgcctggccaaattttttttttttttttttttttgtagagacaggatctctctgtgttgcccaggctcgtcttgaactcctgggctcaagcagtcttctcaccttggtctcccaaagtgctgggattacagatatgagccactacacccagccctgatttttcatttgaaggtgtgctgggctcactgtgggggtttgtcaccccgtcctgcctgctggctccgtacagcctgagcttctctcccccactcccaggtgatggtgagcaacccccactccctggggttccaggccaccttctacgagaacggttacacatcagatgggaacaccaagtacaaactggtgagccgcgtccccaccaaaccctgtcgcctgtcccttgagaggccccctcttcctccttcccttatcagcataaaaatttaggagtttccagggtacatagcccgtggccgtgccccgcggtgggaagatgatcaggcagccgtcaaccacacgcttgacctcattaaagtgtcacacgggagagacccggatggcatgacagggaggagcctaacccagcccggggagggtagccggagatctgagttagttgggtaaactgaggcatgaggattgcgtgggggcagtttccacagggcaggggcctgaccaggtgcaagttggtgacagcaaactcctttaaccaggctcgtcacatcacatccaggtgagtgagaaaacagtcactcctcactgtgggtccccagaactcagggagcaagggaataggagccatcatattggggccgttgtttctgtgagcttccagaagcctttcacaggcggtgggactagaacagagcagggcttggctgggcgcagtggctcacgcctggaatcccagcactttgagaggcca[137 bp omitted]actcgggaggctgaggcagg[135 bp omitted]ggtaacgctcacctgtagttccagctacttgggaggatgaggcaggagaatcacttgaaccagggaggtggaggttgcagtgagccaagatcgtgctaatgcactccagcctgggcaacagagagagactccatctcaaaaaaaaaaaaaaaaaaaaaaaggaacagagtggggctaagcggcttccaggttcgtccccccatgtcccctccaacaccccatctctcccaatgtcctgagttggggatgcccatggtgttccacggatacacttgggattttctctcttgaccccacaggatattttcctaaaacagcagcagcactggggcaggaccgactccaacttcacttccaggtatgttgtctcctgggagaggcggggactgggctgcctacaggggtttccttagcaggagcgaagagaagcaggtctgagatcagacccccagctccagaacagtaaaacaaggcgattacaacactttacaagagctgggcgcggtggctcacgcctgcaatcccagtactttgggaggcagaggtgggtggatcacctgaggtcaggagttcgaaaccagcctagccaacacggtgaaaccccgtctctactaaaaaataaaaaaaaattagctaggcgtagtggcaggcacctgtaatttcagctactcgggaggctgaggcaggagaattgcttgaatccaggaggcagagggtgcagtgagccgagatcgtgccattgcactgtagcctgggcgacaaacatgaaactccagctccaaaaaaaaaaaaaaaaaaagcaaaaataagccaagtgtagtggcgggcgcctataatcccagctactcagggagatatttgcacacctgtgctcacagcagcgtgattcacaacagtcaaaaggcaaaaatcaacccaccggtccatcaccagatgaaaggatgaacacagcgtggtccatccgcacatcgcaatatgactcagacttaagaaggaagggagtcccgggccgggcgcggtggctcacacctgtaatcccagcactctgggaggtcaaggcgggcagatcacctgaggtcaggagttcgagaccagcctggccaacatggtgaaacccccatctctactaaaaatacaaaaattagccgggcatggtggtatgcgcctgtaatcccaggtattcaggaggctttggcagaattgcttgaacccaggaggtggagcttgcagtgagccgagattgtggcactgcactccagcctgggtgacagagtgagactccatctcaaaaaaaaaaaaaaaaaaaaaaaaggccgggggctgtggcccacaacactttgggaggctgaggcaggtggaatcccaacactgtgggaggctgaggcggacagctcacaaggtcaagagatcgagaccagcctggccaacatggtgaaactctgtctctactaaaaatacaaaaattagccaggcatggtgacaggcgcctgtagtctcagctactcgggaggctgaggcaggagaatcgcttgaacccgggaggcagaggtttcagtgagccgagattgcgccactgaactccatgctaggtgatagagcaaaactcgttctcaaaaaaaaaaaaaagtaagggaatcctgacgcaagatacaggctagattggatgcaccttgaggacaacatgctcagtgcaataagccggatacaaaaggacaaatcctgtgtgattccactcctaggaggaccctagagtggtctgagtcacagagacaggaagtaggatggggggtgccaggggctggggagggggatggggagtgagtgtttcatgaggaccaagtttcagttggggaagatgagaaacttctggagatggatggtggtgatggttgcacaactctgtgaatgtagttaatattgatgaatggtgcacttaaaatggttaagatggaaaatttggggcccggtgtgacggctcacgcctataatcacagcaactcaggagatccatagcaactcaggagactgaggcaggaggattgcttgagctcaggagtttcaggttgtagtaagttatgggcatgacaatgtactccagcctgggcaatagagcaagaccctgaccctgggcgacagagcgagacccccatctcaaaaaaaaaaaaaatttctgaatgctgactgaaagccttctatcgagttttcactgcttcttgagtcagttttgtgaagttttttttatttgttttgtttttgtttttttttttgagacgaagtttcactcttgttgcccaggctggagtgcaatggcataatcttggctcactgcaacctccgcctcctgggttcaagccattctcctgccttagcagtggcatgatctcggctcactgcaatctctgcctcctgggttcaaatgattctcttgcctcagcctctcgagtagctgggattataggcatgtgccaccacgcccagctaatttctgtatttttactagagacggggtttcaccatgttagccaggctggtcttgaactcctgacctcaggtggtccgtccgcgtcagcctcccaaagtgctagaattacaggcatgaaccaccgcacccggccagtgttcagaaattaatggatggatggatggatggatggatggctggctggctgcctggctggctggatggtgtattagtctgttttcacagttttcagaactatctgagattgggtaatttataaagaaaagaggtttaattgactcacagttcctcaggcttaacaggaagcacgacttgggggtcttaggaaacttacaatcatggcggaaggcgaaggggaaacaaggcatgtcttctcatggcggcagaagagagagagagagagagaatgagagagagagaaactatcatacattcttttttttttttttctgagatggagcttcgctcttgttgcccaagctggagtgcaatggcacgatctcggctcactgcaatctccacctcctgggttcaagcggttctcctgcctcagcctcccaagtagctgggactatagttcccgagtagctgggactacaggcgtgtgccaccacgcccggctaatttttgttgttgttgttgtatttttagtagaaatggggtttcaccatattggcaaggctggtcttgaactcctgatctcaggtgatgtgcccgccttggcctcccaaagtgctgggattacaggtgagagccactgcgcctggcctgccatatatatatatatatatttttttttttttttttttttttgagacacagtttcactctgtcgcccaggctggagtgcagtggtgtgatcactggtcactgcaacctccacttcctgagttcaagtgattcttgtgtcttggcctcccaggtagctgagattacagacacacgccaccatgcctggctaatttttgtattattagtagagacagggtttcgccatgttggccagaatggtctcgaactccttacctcaggtgatctgcccacctcggcctcccaaagtgctgagattacaggcatgacccactgaggccagccccatacacttttaaactatcagatattgtgagaattcactcactatcacaagaacaccaagggggaaactgccaccatgatccaatcacctcccaccaggtccctcccctgacatgtgaggattacaatttgagatgagatttgggtggggacatagaaccaaaccatatcagaaggataaatgggtagacagatgagtggatagatggatagagagatggacggatggttgggtggatgggtggatgggtgggtggatggatggatggatggatggatggataaatggatagatggatgagtgaatagatggatggatgggtgggtggatggaatggatcgataagtgggtagatggatgagtggatggatagagagatggatgggtggatggatggatggataggtgggtgggtggaatgaatggatggaaggatggatgagatagatggatggatggataaatggatagatggatgagtggatggatggatggataggtggatggaatggatggataaatgggtagatggatgattggatggatagagagatgaatagatagatggatggatgaataagtggatagatggatgagtggatggatggatgggtgggtggatggaatggatggataaatgcgtagatggatgagtggatgggtagagagatggaagggtggatggatggatgaatggatggatgggtgggtggaatgaatggatggaaggatggatgagatggatggatggatgcacggatgactgaatggactgaaggatgaatggaatgcagctgtgtcgtttacaggggtgctattctctaataacacaggttccgttgccttgcagtttaaagaaagccaccatgtctaccttaactgtggacatagcaaacaaggaaatttcatgtgtggatatcaagccactggtaggtcccaaatctttgctgtcccatattcggtgtcataagtgttaagactcatggaagctggccctgaggttgcaatgagctgagatagtgccactgcactccaacctgggtgcaagagagtgaaactctgcctcaaaaactaaaaaaattaaaaataaaaataaacattgatggcataaaaaaatttatggatgcatgcttccacatggatgaacctcgaggagatcccacacagtgagagaagccaggcacgaaaggacaaatcctgtgtgattccgctcttaggaggtccctagagtcatcagattcatagggacagaaagtaggatggggggtgtcaggagctgaggaaggggatgattgaagcagttgaaagcaggcagtcaccatgttggccaggctggtcttgaacttttgatcttggatgatctgcccgccttggtctcccaaagctcccacacttacaggcgtgagccactgtgcctgggccatttttgtatttttagtagagatggagtgtcaccatgttggccaggctggtcttgaactccttttttttttttttttttgacatggagtcttactctgtcgcccagactggaatgcagtggtgcgatctcagctcattgtaacctccatctcccggattcaagcaattctcctaacctcagcctcccgagtagcggggattacaagcatgtgccaccatgcccagctaatttttgtatttttagaagaaactgggttttaccatgttggccaggctggtcttgaactcctgaccttaagtgatctgcccaccttggcctcccaaagtgctgggatcacaggcatgagccactgcgcccaacctggtcttgaactcctggtcttgtgatcctcctgcctcagcctcccaaagtgctgggattacaggcatgagcccctgcacctggccaatttttttttttttaagatatgaatcttgcattctgttctaaggtaaatccatgtttgtcttgctttttggtttgctttatttattttttttattttttgagacggagtctcactctgtcgcccaggttggagtgcagtggtgcgatctcggctcactgcaagctccacctcccgggttcacgccattcttctgcctcagcctcccgtgtagctgggactacaggcgcctgccacca[184 bp omitted]gttcaggctggagtgcagtggcgcaatcttggctcactgtaacctccacctcctgggttcaagcaattctgcttcagcctcccgagtagctgggattacaggcaagccccaccatgccgagctaattttttgtatttttaatagaaatggggtttcaccacattggccaggctggtcttgaactcctgacctcaggcaatttgcccgccttggcctcccaaagtgctgggattacaggtgtgagccacagcacctggctgttttttatttgtaggtacagggtctcactctgtctcccaggctgccgcacagtagcacaatcaaggctcactgcagcctcaaccttctaggctcaagtgatcttcctgcctcagcctctcaagtagctgggattacaggcgtgcaccaccacacctggctaagttttatttttcatagagatgaggtgtcactatgttgcccagactggtctctaactcctggcctcaagcaatcctactggctcagcctctcaaagtgctgggattaaaggcgtgagccactgcgcctggcccatgtttgtcttaatacaaaacagttttcaaatactaaaagtcccttggtcctgtggcttttagactccattgtataactctgagggtgccgtgcactgcagtttgagaagcatgtccctaaggctgtagagtaacccccaattgctctctctgtcttctttctcctttttgtttattcattctaggccattgatttattcattcattcattcattcattcattcattcattcattcattcattcatacatgcatgcgtgcatttttttccccatgctctctgtgtaccagggatcatgctgggctcataaattagttctgggcctggcatggtggctcacatctgtattcctagcactttgggaggcccagg[131 bp omitted]gaggcaggagaatcgcttgaacccagggggaggatgttgcagtgagctgagactgggccactgcactccagcctgggtgacagagcaaaaactctgtctcaaaaaataattaattaattaaaagaaaaagttaattctggtctccgtgaagccactaatagctcctcaggcgacaccaggagtttagccataccccaggctctcagagcttaagctccgcggggccagctgcagttacggtgcatcccaggcatccagggacacgctgttgggatccaggccacatggtttccaaaccattcccacaggagtgtgtccctgtatagggttcactgtgtccgggtgaccctcactgacctgggtccatatttctgtctctctcctctgcagtcgacactgatttcagttggctgcgacctggataaaaagatcgtcatccagaagtaagtatgttgaggccgggcaccatggctcattcctgtgatcccagcactttgggaggccgaggtgggcagatcacttcaggtcaggagttcaagaccagcctggccaacatggcgaaaccccgtctctactgaaaaaaaaaaaaaaaattaggcgtggtggcagacacctgcaatctcggctacttgggaggctgaggctggaggatcacttgaacctgggaggtggaggctacagtgagctgagattgagccactgcactctgcactccagcctggctgacacagcaagactctcgtcttgaaaaaaaaaaaaaagtaagtatgttgatattggagtggagtgaggagaggggaggagagtagttgacagggcacgattagccacatggtaacaattgctgaggtggatgactttcgattatttagttttgtatatatttactatttccataataaaaagttaaatgattcaccctaataggttaagtttgtttccagcatgttggcctcccctccttcacctgttggtgatatccacatttttttttttttgagatggagtctcgccctgtcacccaggctggagtgcagtggcacgatcttgactcactgcaacctccgcctcccaggttcaagtgattctcctgcctcagcctcccaagtagctgagattacaggcgcccgctaccatgcctggctaatttttgtatttttagtagaaacggggtttcaccatgttggccaggctggtctccaaatcctgacctcaagtgatttgcccgcctcagcctctcaaagtgctgggattacaggcatgagccaccgcaattggccta[223 bp omitted]gaggcaggagaatggcgtgaacccagga[139 bp omitted]tgcccctcccagagctggggtctctcaggtttttttttttttccatatctgctcatttggcaactgctcatgcattagacgcaaaggtgtgccctcccttttatatattattattattattgagacggagtcttgctctgtcgcccaggctggagtgcagtggcatgatctcggctcactacaagctccgcctccctggttcatgccattctcctgcct[183 bp omitted]ttattttaatttttatcgatttatttttgagacagagtcttgctctgtcacccaggcaggagtgcaatggtgcaatctcagctcattgcaacctccgcctcccaggttcaagtgattctcctgcctcagcctcccaagaagctgcgattagaggcgcgtgatgccacgcctggctaactttttgtatctttagtagagacggggtttcctcatgttggccaggctggtctccaactcctgacctcaggtgatccgcccgcctcagctcccaaagtgctgggcctgagccaccacgcccagcccctccctttctgtcccatccataatggtttggttctttgtgaggtcatgccattgctcaatgtccacttttgcttgcagcaaagtttccgcctgttccatgggcatcctggaccccttgaccctgcaagacaattacagcttcatcatcgagaagtaagccagcgtccccccgcaacacctgacacccaaggcgaccattgggcctgcaaaagccaagagcaaattaggaat[134 bp omitted]gcctcctgagtagttgggactacaggttcccgccaccaggcacggctaatttgttttatttttagtagagatgaggtttcactgtgttagccaggttggtctcaatctcctgatctcgtgatccgcccacctcagcctcccaaagtgctgggattacaggcatgagccaccgcgcccggcctattattattttttaagagatagggtctggccctgtggcccaggctggagtgcagcgatgcgatcatagctcaccacagcctcgacctcctgggctcaagtgatcctcttccctcagctggctggtcccacatgctgtccggctcagtgagcatgtactgccacgcccatacgagagtctgggcctcagtcaatttgtgctgctttaaaagactacctgaggctgggtgatttataaagaagagttatggccgggcccggtggctcacgcctgtaatccctgccgaggtaggcggatcacttgagctcaggagttcgagaccagcctggccaacatggcaaaaccccatctctactaaaaatacgaaaattagccaggcatggtggtgggcacctgtaatgccagctactcgggaggctgaggcaggagagttgcttgaaactgggaggcagaggttgcagtgagccaagattgagccactgcactccagactgggcaacagagcaagactctgtctcaaaaaaaaaagagagagagagagaggagggaggaggctgggtgcagtggctcacacctgtaatcccaacactttggaaggctgaggcaggaggattgcttgaggccaggagtttgagaccagcctgggcaacctagagacaaaaaaaaaaaaaaaaaaaaagagggtggtgggatggggggaggaggtgccaggctcttaaacaagcagttctcatggaagctgagaatgaaaacccactcagtaccataaatatggctccaagccattcatagctctgccgttgtggcctaaacacctctgactaggctcccactccaacactagggatccagtttcagcaggagctttggaagggacaaatatccaaaccatacgaagacccctcattgcacccagcatgagggagctccttgccacgcgagtgcacacttccatgtgatttgtaagacctgagccctcaaatgcaagtcaagagtcagttacccatttagagctgaggcctaaactagtgcttctgggctgctaaggggcagtgactttggaacctgcggaggacacagaggggagtgtcatcttagtctatgtgggctgtattgcaaaatgccttaaactgggtaattt[131 bp omitted]gtgaaatcccgtctctactaaaaatacaaaaattagccaggcgtggtggcacatgcctgtagtcccagctactcaggaggctgaggtgggagaatttcttcaacccgggag[137 bp omitted]agtgggtcacccctgtaatccctgcactttgggaggctgaagtgggtggatcacctgaagtcaggagttcaagaccagcccagccaacatgatgaaacccacatctctactaaaaacacaaaaaattagccgggcgtggtggtgggcacttgtattcccagcttctcaggaggctgaggcaagagaatcacttgaacccgggagagagaggttgcagtgagctgagattgcaccactgtgctccagcctgggcaacaagaatgaaactccgtctcaaaaaaaaaaaaaaaaggcaaaaacctcgattacttttgcactgatctaatttaaggagcagaaattttgctgggcttggtggcttatacctgtaatcccagcactttgggaggctgaggtgagggaatcacttgaggccaggagtttgagaccagcctgggcaacacagcaagacctcatctctacaaaaatttaaaatattaaccatgcgtggtggtgcgtgcctgtaatcccagccactcgggaggctgaggtgagaggattgcttgggcccaggaggtggaggttgcagtgagtcatgactgcattactatgctccagccaaaaaattaactagaacagaagttccaatatcatctggtccatggctctcaatcgcccacctcagatgccacctcctgccactctcatggacgatccccatttgcaaaaaagaaactgcggctgtgaagggttggcagactgggcaggaactcacagactccccatctctgcttcttggtgtcttgaagggaattctacgaccccggcttccaggggcagcagtcctccgaggacctgcacgtgttttactcctaccagcagctgggctgtcctctcctcgtctactatgacaccctatggaagcccgtggtggagctgtaagaccccaggggggtgctgcagggtggggacggtggcagggcctcatgctccctggccctggggtaccagcctggccctccaggctcccctagatccctcaaaatgatgatggtcactgtttcccaccgtgctcctgccccagccccactggcccccagggccctctccctggaacaccttttctttttttgagacagggtcttgctctgtcgcctaggatggagtgcagtggcatgatctcagctcactgcagcctctgtcccttgggctcaagcgatcctcccacctcagcctcccaggtagctgggaccacaggtgcccaccaccacacccagctaattagcagagatttggtttcaccatgttgggcaggctggtcttgaactcctgacctcagatgatccgcctgccttggcctctcaaagtgttggaattacaggcatgagccactgcgcccggccgatgggcttttctttatgcctgtgcactcctgctgtcttcctgttcttttttttttttttttccactctgtcacccaggctggagtgcaatgacatgatcttggcttactgcaacctccacctccagggttcaagcgattctcctgcctcagcctcccgagtatctgggattacaggcgcgtgccaccatgcctggctagtttttgtatttttagtagagatggggttttaccatgttggtcaggctggtctcgaactcctgacttcgtgatccacctgcctcagctttccagagtgctgggataacaggcgtgagccaccatacctggccatcttcctgttcttataaggacaccagtcttatcagatcagggcccaccctacatcctatgacctcatatagcttttctttttcttttcttttttctttttttcttttcttttcctccctttcctcccctcccttccttccttcatttccttcctttctttctctctctctgtttccttttttctttttttttttttgtgttggcgtcttgctctgttgcccaggctggagtccagtggcatgaacacagttcattgcagccttaacctcccaggctcaagcggtcctcctgcctcagcctc[164 bp omitted]ctcctgcctcagcctcccgagtagctgggattacaggcgcccgccactgcgcccggctaattttttttatttttagtagagatagggtttcaccgtgttagccaagatggtctcgatctcctgacctcgtgatcctcccgcttcagcctcccaaagtgctgagattacgggcgtgagccgccgcgcctagctccgagcagacttttccttccaccctgttatcaatgctcagtgctggctgctgcccatctccccatgcacccagctctttctcctggcctccccgcagcccacacacggcatcctcagctgggagcggcaggcgtcctttggtttcctctctgtcacctcccaccccccaagcggttttgcagccgtccaggtggctgtggcccgggtcttcctgggttgtccctgctccctgcacagccctgccccgtgcctgtgtcctaggtggcgaaaagacagtttccaggaggtcatcgacgccgagtatgtgttactggaggtgaacgggcagttctcatactcctattccctgacggcccagtcggccatgtgtacctcccagccgcagaactggaccaccatgataaaggaattcggggggcccttcttctggaacagagaggtaacaggaccctaggatcgtttccagaagaatcagcagcccaccagggggtgggagagtgcgt[139 bp omitted]tggcaaaagcccgtctctactaaaaatacaaaaatcagtcgggcatggtggcggacacctgtactcccagctactcaggagaatcacttgagcctgggaggcagaggttgcagtgagcacagatcacgactgcaaaagactcgaaggtcctttaggggatctagcaggaaccccaattccttttaggggtgtacaaggcctttgaggatttaaggaactgaccgaaggacgggaaatgcaggcaccaaggtgttcagggggctttgctgatgatgagaaatgcctgggaccatcccaatgcttgctactgagggatggatggaattcccgggctgtcttactcagtgtgcatctgttttatttttatttcttttaggcagggtctcactctgtctcccaggctggagtgcagtggtgcaatctcagctcactgaagactcaagcctcaagtgatcctcccacttcagcctcccaattagctgggactacaggtgtgtgccaccatgcccagctaatttttgtatctttttttttttttttttgtagaggcagggcttcagtatgttacacaggctggctttgaactcctgggctgaagcgatcctcccatggattataggtataagtcaccacgctcagcctcagtgtgtatttctatcatacgagtgatgtcctgtccctacaaagagattgcatcagtccacgtgtatcttcccgggacacaatgttttgtatcaggaatgcagtgcatgcagcaaagccaccagcagatggtgtcctggctctttttttgcatttgctttttttttttttttttgagacggagcctcactgtgtcccccaggctggagtgcagtggcgcaatctcagctcactgcaacctccacctcccgagttcaagcaattctcccgcctc[206 bp omitted]ttcttcatatgggctgtctcattgcaaattgcatgagtgcatttaagagatggccccattactattttttttccatcagct[137 bp omitted]caaaaccccgtctctactaaaaatacaaaaattacctgggcatagtggtgcacgcctgtaatcccagttactggggagcttgaggcaagagaatcgcttgaacctaggaggtgaaggttgcagtgagccgaaactgcaccactgcactccggcctgggcaacagagcgaggctgtttctcaaaaaag[141 bp omitted]tgaaaccccgtctctactaaaagtacaaaaattagcagggcatgatggtacccacctgtagttcccgctacttggaaagctgaggcaggagaattgcttgaacctgggaggtagacatcgcggtgatcccagatgacaccactgcactccagcctgggggacagcagaagaaaatgtctcaaaataaaaaagtcattggaagcgcctgactctcacccaggctaagttattaagcctccagcctccacagcccaggaaggcctgaaagcaggcatgtggcagactgccacggttactacttgagacggtcactacaacagttactactgctactacttgagaccttcgttacaagactgaaggaagggggaacgaatgtagaaatgaaaacttaagacaaaagaaactgttttaaagaagaggcatggggaagaagagagctccccgcttctagtgagtaaaggcagtccctcaagcttccacagacctgcgtatttattgagtagaaacagcagggaggggccaggcgaggtggccacgcctgtaatcccagcactttgggaggctgaggtgggtagatcacaaggtcaggagattgagaccatcctggcttacatggtgaaaccccatctctactaaaaatacaaaaaaaaaaaaaaaaaatttgctggccacggtggcgggcacctgtagtcccagctactcgggaggctgaggcaggagaattgcatgcatccgggaggcagagcttgcagtaagccgagatcgcgccactgcactccagcctgggcaacagagtgaaaccccatctcaaaaaaaaaaaaaaaaaaagaaagaaaagaaagaaagaaagagcagggaggagcaggtaacgattggtcagctggttaattgattacaggttcatattattactaataggcttcagatgtaccaaatcagaagaaacactgtgcctggctcgtgaccgccctcagcattccttctgggcggcagacgcagtttgtcagtttgccaacattctgcttttatgagaaagtttgctgtttactcatatggcctccagtggtatacggagttgatcaccaccctcaatctttcggcctccaacagaggcaggtgagatggaggctgagcagcctccatccactcttctctgcagggagcatgaacctgcccacaccatgggcacttggccccagagtcccacccatgcgtgcctaatgaggactggggtgggtgcagggcctccgcagggaggagggaggctcagggccccctccccagtccctagggccagtgggcatgtctctgtcccccacagaactatgtgagctgccacgaccccaacaacaatgcccctttgaggtggccagacgtccagtatcagatcttgggcggccggacagcaaaccagatcattttcggccacaatggcttttatgtcttctacatttcgatcgtggatccgtactacaggtgagtgggcccatctgcccctacgacaggggacgcctggtgcccctgggggcaggtcacccgtttcgggggacatgcaggtcctggctaaacctgaattcccccaacagcccaggccgtccccaggacaagtgatgttttaagttctgggtgacatttgttcccatgtgaactaaatactcatttcagagtcctgcactgagtgctgggggaacagcagtgaccagaggctgtgccgctgccctggcgcacctgagtcgccctctcctactccccatggctagagtgtgctgatggctgtgggccagagctggctcaaactggctcaccaggagtagactctcaaatattcaggaatcttcagcctggccaacctggtgaaaccccgtctctactgaaaatacaaaaattagccggctgtggtggcaggtgcctttaatctcagctactcgggaggctgaggcaggagaatcgcttgaacccgggaggcagaggttgcagtgagctgagattgcgccactcactggcctctagcctgggtaacagagcgagactccatctcaaaaaaaaaaaaaaaaattcaggaatcttacaccaatcaatttcatgtcagtggcttcgaatcagccacagtggaaatatttacactacgggaattggcagacactacccaggaggcctttcccctctgagagccagttgttaaatatttagcactgacaggtgctgaggagattataaagccacatcgaagccatgccatgtggatcagtgtgtccctttggaagggggacaccaggtggaaatcttcctcatatcctcacccctactggaagtcattgtcacttatcacctgtcctctccagtaggatgaaagttcaccccctgaaaaaaaaacacgtggaggtcctgccttctctagaggccccagactaggaggatcagctccggggtggcagcaggtggaaggcactgggtagggtgaggatgtccaccagagagaggagacatgtgtgggactctcccgtgccacaggtgctccctgcatcacgtgacctgcactgtccccctccctgccgtggattctgtgacacccctgaacctttcctgccctgacctagcctccactgtcacccaccacttcctagttgttgatggaccatttagttaatttgccccttccgccctctctagccagagcctgggcattgggggagaatagggatcctggtgacagctgccagagggcatggagaggatggctgactcagaacccataaaagtcggcctggcacaatagcttacgcctgtaatcccaacactttgggaggccaggacaggtggatcacttgaagtcaggagttcgagacaagcctggccaacatggagaagctccgtctctactaaaaattagccaggtgtgatggtgggcgcctgtaatcccagctactcgggaggctgaggcaggagaatcgcttgaacccgggaggcagagattgtagtgggccgagattgcaccactgcactccagcctgggtaatagagccagattccaccgtttcaaaaaacaaacaaaacaaaacaaaacaaaaacccataaaagtcaaagtgggccaggtgcagtggctcacacctgtaatcccagcattttgggaggcagaggcgggcggatcacttgaggtcaggagttcgagaccagcctggccgaggtgaaaccccatctctaccaaaaatacaaaaattagccaggcatggttggcaggtgcctgtaatcccagatacttgggaggctgaggcaggagaattgcttgaattcaggaggcggaggttgcaatgagccgagatcgtgccactgcactccagcctgggtgacaagagagggactccgactcaaaaaaaaaaaaaaaaaggcatagtggatggaaacagaagtgggtatacccggtcactgctgtgggcctggttctccctcctgtgggtctgaacacctttgccagagataaggcgaagtcccccaaaggcaatgcccaacagcctctccccgcctccccccaccgcagctactgtcaactggagaccatctttagcatctacgtgtatggagcattccccgtgcagctggtctctgctggagtcgtcatcctactgatcatctccagcatcctggggtccgtttggctggcctacaagacccccaagctgctacgcacagcacgcggccgcaggatcaagaagtgtgcgacacagctgtgtaggagatgcaagacggtctgccagttcagggcctcagccacagccagggcaggcacagagcccccgggacgccaccgcactcctcacggaggcaggtctgaccactgaggccggtccacagggtcccaaccccttgtcttcaaataaagtataatgtaacatagcagg[135 bp omitted]cctgcctcagcctcccaagtagctgggactacaggcgcccgccaccacgcccagctaatttttttgcatttttagtagagacagggtttcatcgtgttagccaggatggtctcgatctcctgaccttcgtgatccgcccagctcggcctcccaaagtgctgggattgcaggcatgagccaccatgcctggctttttttttttttttttttttttttttttttaagtatcagtgtggtctcattgtgttgcccaggctgagagtgcggtggtgtgatcacagctcactgcagcctcaaactcccaggcttaagtgatcctccctcctcagcctcctgagtagctgggactacaggaaccaccaccacacatggctaattttacttttagtttttgtagagacagggtctcactttgttgcccaagttggtctcgaactcctggactcaagcgatcctcctgcctcagcctctcaaagtactgggattatggatgggccagtgctctagggttagccatctctctgagtgagatggagtctcactctgttgcccaggccggagtgcagtggtgtgatctcagctcactgcaacctctgcctcccagattcaagcaactctcctgcctaagcctcctgagtagctgcgattacagacgcctgccaccatgcctggctaatttttgtatttttggtaaaggcagggtttcaccatgttggccaggctggtctcaaactcctgacctcatgatctgcccacctcggccttccaaagtgctgggattacaggcgtcagccaccgtgcccgccccacccccgaccttttttttttttttttttcggagacagattcttgctcctttgtcctggagtgcagtggtgtgattttggcttactgcaacttctgcctcctgggctcaagtgatcctcccacctcagcctcccaagtagctgggactacaagtccacgccagcatgcctgggtaattttgtttttttactatttttttttgtagagatggggttttgacatattgcccaggctggtctcaaactcctgagctcaagcgatcctcctgcctcagcctcccaaagtgctgggattctcagtgaaccactgcaccagggtcagccatctccttttaagtgaaaatttggtcagtctcatgacttccgattactctttggttaaaaaaatatatatataaaatatacatacataaaaaatacatatataaaatatatatattaaaaatacatataaaaatatgtataaatacatatatatattaaaaatacatatatataaatacatatataaatatatattaaaatacatatataaaaatatatatattaaaaaatacatatatatattctgtgatcattttaaattgccccacatagctacaacaggctggggcagggggatcacttgaggccaggagttcaagatcagcctggacaacatagcaagaccccccatctctacaaaaaaatttttttagacattagctgagtgtggtggtgcatgcctgtagttccagctacttgggaggctgaggtgggaggatcgcttgagcccaggaggtcgaggctgcagtaagccatgatcacggcgctatactccagcctgggcaacgtagcgagaccctgtctcagaaagaaaaaaaaaagctactgcttgggtccttgcagacatccactgtgtgaccctcactccacattaatcttcaagaaaagtgatccaggtccttgccccacttcctcatcagccaggacctccccgacacttgggatacctggttttagtttcagagatacccctaatgaggcttcggggagaaggagttgaaaagcagctgagaaaagtgggcttggggctgggcgcggtggctcacgcctgtcatcccagcactttggtaggctgaggcgggcggatcccctgaggttaggagatcgagaccagcctgaccaacatggtgaaatcccgtctctactaaaaatacaattaaccaggtgtggtggtgcacacctgtaatcccagctactcgggaggctgaggcaggcaggagagtcacttgaactcgggaggcggaggttgcagtgagccgagatcacgccattgcactccagcttgggcaacaagagcgaaactctgcctcaaaaaaacaaaagtgcacttggagtctctcccagcctgtgtccccacgggtcaaacagtgatgaatggggatcactgcagatgccaggagggcacatggcacagtccctgggacagggggaccctgtcttgagggccacagctgcatggccccgagacactacccggagttgtttttgttttttgaaatggagtcttgctctattgcccagggtggagtgcagtgatgtgatctcggctcactacaacctctgcctcccgggctcaagcaattcttgtgccttagtctcctgagtagctgggattacaggcgcctgccaccatacccagataatttttgcattttctttttttttttgagacggagtctcactctgtcgcccaggctggagtgcagtggtgcaatcttggctcactgcaagctccgcctcctgggttcacgccattctcctgcctcagcctcccgagtagctgggactacaggcacccgccaccacacccagctaatttttttgtatttttagtagagctggggtttcatcgtgtttgccaggatggtctcaatctcctgatctcgtgatctgcctgccttggcctcccgaagtactgggattacaggcgtgagaagctgcgcccggccaatttttgtattttcagtagagacagggtttcaccattttggccaagctggtctcgaactcctgacctcaagtgatctgcccgcctcggcctcccaaagtgctgagattacaggtgtttgccactgcacctggcctcctcctgagttttttgaataagggtttccgggagagtagctccagagagcagcaggcacagtgccctacacagagccgggaccatggtctctgctcggcctccaaacacccatcagcctcctggactctaggtgagcctcccagggcctccccaagcagaggccttgaaacccaaactccggagacccaggagatccagcccgcagcctggggaaggggtaggctgaaggttcccatcccagaggggtgtcctcatcccaggaggcgctggatggcactcgacctcctgtttccttatgtgtccctgggggaatggggtcagcctctccagggccaccatgagcgtttcaggggaggagggtacaggtggccactgcctggacccccaggagggctctcgagaccctgatgtgggtaagcagtgacgggaaccagcacccggaggtcgttcttccgaggctgggcccatcccattttggaacgagtagccaggctgtccctgccaccccggaccccgaagtgtggccgggtggggcccctgaccctctcctgggctccaggtgctgtctcctgtctccatcttgggtgcacatgccaggccccctgggtgccgtgtgctccccaccccttcacgcgtgggcactgtctcatccctgccccagcccccaccctcagaccatcaggtgaagcccctgcacccacctgtctgtctgaacaagagcgtggcccttcccgccctgcctgcagtggctgtggcttcctggggacaggaggcagctgggtggggatctggaggatgctcctcaagccctgccctgatggctgtgtgtctccaaggaagttcctgctgctctgggcagccttgctttcccccaccaaacaaaggggtgaaaacccttagaacgcgttgagtctgggggtcagctccctcgtgccccaggaggcccctgcctctgccagaggagtctgatgttccagggctgggactcaaggagtttagggtgtcctgtgattccggggctcccctgctaagaggcctcactgtgaggccgggggcgctgccttgccagtccgcgggatgatggggtgaggggccaggcgtgcatctccagccccctccccatccccaaggcccccacgtggacatggagctgaaaggtcaaatgtgctttaatgcggggtggctcccaggtcctccctgggccccgggggagtggcgctggctgggcctgccggctgcctggccttccttcccggctttcccttcttggccgtcgaggcctttctcttgccagacagaatgggggccggggtgttggtggcagggggccccgggtggggcggctgctcctcgtcgagcgccttgaagttgaagaagtagtcaacgttggacacggtgtccaggatctcaggcacgctgtagtcaaaggacagcagctcctcgggcaggcacagcgagcggatgtcatcggctgagttcccaccactgctgtcaggcagggccggcccagggacctcgcacagggtaccctcaggctcagaggcgcctggcaggcagtcgaagagcttcatggcgtcctccagcagaaccttgtcaggcagtgccaaagctctggccgtcttgggggccttggccttgcctgctcccagcagggccccctccttgacctcggccaccttgagctcgctgaggcccggtgggtacaggggcaccccaggtcgggccccactgccctgcagctccttgacggggaaggccaggggttcgggcccagggaagtggccgaggtgaccctggaggtggctgtaggcgtctgggggcagtgtgggctctgcaggcagcgtgatgagtacagggggcggcttgttctccttggggggtgggggtggcagcggggccgggccttcctctaggggcggtaggggcagctccacgaaggcggcgggccctgcgtcccccacaaaacccagagcctctggcccggggccctcaggcgggaagtagggcaagagaaactggggccccccgggtgcctgctggtagtgggggtatggaggcagccccggggccttgaggtagggctgaggctccaggaggtagctgcctggggcggaggggacccccgctggccccccgctgcttgctgccagcttatacagggctgactggcccaggtcgggggtggtccactcgatccgatagatgcgggggtcgaagaagcacccgcatggggccatctggaaacctgtgggcggcaggcgggtgccctgagagcagctgctgcctgaggggcccagcccaagcctgggggcctgtttgggagatgccacaagaaccttgccattggggggcccctttgggggacgacatagatattgctttggggccctggctgggtgatggatgacacagagcttgtctttggggctcatctgggggacctgtgtgaagcatggggagcagaggccatgccttcaggctcccacttagggacggggcaggggcaagatgggcctgcacactcaaacccactcccagcctcgtcaagggctcaggggaggccggtacctgctggtggggctggaaacacctctttctctgggtctgggggatgatacaggttcaaggagcctgtggacaaaggtgcccaggtgggtagggcccttaggcgggtgggcccctgaaccctctccagcaggtgctcccacccacccgatcgtacccatagcgggaggaggctcggcacaggtgggagcaggctggttgcccagcacctcagccccctccagactctgcgggctgaaaccttcctggggagctgcaggggcacagaacggtttggggtgctgcatggggcagcggggggcccggtccagacaggccaggagggcggcagtgggagtgcaagtggcccaaccggagaacaggctgagaacctggtggggttctgtttgcctggttactcggggcagcgggttccagcctgcagcgcgcccactggttggggttctgggtgttgggggcaagcaggggcagacgttggcagacatggtcatcaccatgggagggaggattctgggccaggcctttgcctcttccagcaacacccccctaacagctttgaggccgcctcctccaggcaggctgccctgatccacacccacacaggctgaggccccccgggtcctcaacccgctaccttcttgggggtcaaggcctctctgggcaccagcagcacccagcttggggcagggcccatggaggcagctaagaggtttggggaaggtgggggccgaggaggggctgcttcagggtcacagaaaggcctggattttaaaagaataaaatttattgtactctcctcgccccagggtgcccctgggaaagcctgaggctacttgtacgcgttggccttgtgcttcggcaagaaggcgaagctggggggcactggcccaaggagcatctcgctgtgggagagcaggtggaaagcgaggtcaggcccaggacctgcaaagtaccctccgtgaccccgggcccccgactgcagctccccaactccagcccacccaggcacctgatgcggatccagtcggctgccttctggctggccatcagcgtctccaggtagtcgcggcccaggtagtagggcggccgctcgttgatcctctgtgggagccgctccagcagccccacgggcacgtacctgcggcgggtgggcgggcaggacaggcttgagtcagctctaaccagccgcggcccacgcgccgcccaccccagccagccccggtgcccaccggcacaggaaggacagccactcgagcagaaagcgccgggtcttctccacgccctgcgtgtccgagccccagtgctccaggccgtagttggtgaagtcccgcaggatgtccaggcgctcggacgacgagatgtcccagtgccgctgctccttgatctccgtgaagagccacggcttgagcagggcgccactgtgggacgggtgacgatcagtgggcccagccaccagcctgcctgggatcgtgtggcctctgcttccatggcctggcctgagccggagcccagaccacaaaacctacaagcctagtaagcctcccagctgcatgcacacaaccttcaaagcacaggactttcttttgttttttctgagacggagtctggctctgtcgcccaggctggggtgcagtggtaagatctcggctcactgttcaacctccgtctcccaggttcaggcaattgtcctgcctcagcctccctagtagttgggattacaggcgtgtaccactacacctggctaatttttgtatttttaatagagatgtttcaccat[137 bp omitted]gcagcagcaatttccagtcccctctgccgcaacgcagctgcaactcctgacatcgctctctgctcctcccatcttgggaccaacagcccaccacagaacaggggtgggtgacggcgtgttgggttcagggcactgctgctgtgcatgaagctggatctctaacatccctgggcacttaccgggcaatcatgatcccggtgacaccagtctgcatggcgcggttggcatcctcaaatgacaagatgtccccatttcctgaggagacagaggctggggtctcagggagacatgggcaggtgggaccctggagttctgctcaccagcccttcaggagttttggctgacccagtggctcccatcagggtggtacgagggggtcccaagtgggaaggcgaacagcccagaggtgtgagtgaccaagggtggtaggggagagggaggtggcttcccggaacacccaccgaacaggggcatggggctggcggcctgcacgcactcctcgatgtactgccagtcggctagcttggtgtagcgctgctcccgagagcggccgtggagctgggggagaagccgccacgcagggtaggaggcagagagtgagacgcagagaggaagagaccaagagagccaggctgagagagacagagagagacacaggcggagacagagggaggtgtggaggtgaagagggagggatgggaggagaggagccattaggaagggacgcggggtcgaccgcgaggccccaatgcccgaggcgtcccaagacccaccgtgacgagtgccacgccccagtcccgcagctcgggcagcaggcggtgcgccaggttcacacgctcctggacgcctgtgcggatcttcacagtcagcggcacatccagcacctacaggacggtggtgggaggtggtgggagatggtgggaggtggtgggagacggtgggaggtggtgggagacagggcccgggggagttgtttgggagccagtgcgaggatgtggctggccgtacctggttcatgccacggacgatctgctggaacttggtggagcgattcatgagggcacagcccccaccctggaagagacaggcgggtggagggagggcaggacgtgggctgacccaagacccctcacccctgctgcccggaggcccccaccaggagacgccgacctgcaggaaaggcagggactccagggccacacttgagcccaaacccctgaccctccaccgagacatcgccggctgggtcagtgcctccctgcccagatggggaaaccgaggcacacgtccagggccgctaccttcttgtacacgaggtcgatggggcagccgacgttgatgtccacaaagtccacctccacggtgcggctcagcagctcggcacacttggtcatggtgtcggggaaggcgccctccagctgtaggtgggtagtggcagaacaggagggtgaggggagagtccgaactgtccccacttggccgttccctccccactggggggccctgagccagtggcctcctctctcggggcctccccggaaggagccaaggtctgtctgcgaggcaccggtccccggccacggccatcagcccccagaggtggatcagggcatcacccccactccacagctgaggccagggggtcagggaggcaaccagggcagacctggaacctggctctgagacaggacggccgagggcccctccactctccctccctcggggtgggcactgacctggacgccaaagatgtcctcacactggtggcgtttgagtagggcccactcggacatctggccctgcagcaggttggtgcagacggccatctctccacatgtcacatccgccccgaagcgcttgcagatccgtcggaagggcaggttcccacactgcggggggagcaggacagacacacatgctcttgcacgcgcacacacacacacacacagcagaaccctgaatatgcgccccagccccacaatccagtaggtggggacagacactaagccctgttggaatgaccacactgccaccctgccacccgaccagccacctgacccaggtcctaccgtggtgaggggggccaggtaaagtttgccacggatgtccagctggagggaaaaaaatacacacaagtggagcttggcctccaccccagctgctgaggccctggagcctcccttctacccacagtctaggacacacttggcccaaatggtctggctcctttgctgggcctctgcatgtgccaatcaatcccttcatcaggaatgttcctttcctcatcgtctcctccactggagagcttctacttaaccatccaaacccagtcccaatgccccctcttccaggaagcctcccacatttgtcccccgctgcccgaccctgaccctctgagacttagagtgtgtccagctctttttttttttttttttttgagatagagtcttgctctgttgcccaggctggagtgcggtggcacaatcttggctcactgcaacatccgcctcctgggttcaagtgattctcctgcctcagcctcctgagtggctggaattacaggtgcccgccaccaggcccggctaatttttgtatttttagtagagatagggtttcaccatg[139 bp omitted]aggacagagcacagagagggagactcagccaggagctccctcaaggcacacagcctctgactcccaggcagctagaacaggaacgtggacacagctggtatttaatagacgcacaccagatggacagatctgctactgacgttgtcctcaacacgtacccgcttcttctcacagggccgcagcctgaccacgtcctcatccgtcaggggcccgcaggtccgcacggggctgctgggaggggtgctagtgcccggccctgcggggacctgctgggcaccacagttttcctgcctgggagcgccctcggctgccgtgccctcggggacagcggcagcgggtgtggggccctggctgaaccggcgcagggcctgctcagctcgctcgaagcggacctcgcgcttccgcagctgctgctgcagggctttgtccaggccgttgcggatggacgggggctgggtcccgcgggccgccaactcctcctgcaccaggttctgtccctcgggcctcaggtgggccccagcgaagcggcaggtcacgccgtaggggcaccggccgaaggtctcgaagagcacgcagcgggggcccaggtcggccggcttggtctccaggtagcgccccacgtcgtgcagaaagcggcagcgatcaccgaagaaacacttagcagccgactcctgcgaggaaacagggaagcagtgagggaggacagggagaccccggggcagcccagcagccagggttcaaactctagatcacccctcctggctcttgtgtccctgagcaagtcaggcacctcaccgtgcctctgcatctccatttatacaatgagaacaatgacaagccctacaatgtatcccgaggagaatgaagacggaatggcatcagagcaagctcactgctcgttgctgaaggcccaggagctttctaacaattacccgctgccaggaaacacaccctgctcctgcctgccccggcaggaatgctcacgtggccgcacttgcctggattagggagggacacagcctgttcttgtcgtagttcgtgggcttcacatggggccggcccttgttttgtccccgggccctcttctgagtctgtagctgctccccgggctctgctgcctcctccgtctgcccgtccgccgtctgtccatcctccagtcggatccgcttagcctcaggctcagccagctcattgccagcagggtctcctacctcggtttcccggcaagtcttctcctgccctttggcttccaggaattggtgaaactgctccttggtggtgaggtatctgccgacagaaagggaaaggaaaaccctccgaacatagtcaataaacactggggaaaggaggctagaaacacttgcacgtccttaaatccttctgctgatggggagctcactacttaagaaccagccagctcccagcctgggagcccctcacggcctcaaaaaagacctattttgtccctgggtcctcactgtccaaagtgttgcgcgaaactattatcaggttcagtcaagaacgtccctgcgcacgttaggctgcgaaaaactacaattcccagcatgccttgaagcggagtctaagccaccacatttcccagcacgcctttcggcccttcaaacaccgcaggccccagcacgccccgcggcactcgcttcaaccccaagacccgccagtaacggccgctggcagagcacatgcgccgtacgtccatatgcagggactacaatccccagtatgcagcgcgggcctggcctcaaatcccacctgccctagcatgcacgtggtgtccttcgcgcatgtgacaggccccaacgtgcacgatctcaggtacctccgctgaccaccctgcaggcggaagaacggcccggaatgaagagccggtggcttctcgccctcagccgctgcctaatctcccggcatgcacagctcggaccgcgctatgggtgccggaaaaggcccttcagcttccctcctgccccggcgactcactgacgcttaatgggcgccactcctcgttccaaagctccggctcccgagtcgccaccaccaccattctctagaggagcctccgccgttccctccgccatcggcgcccctcacatccgctctggagtgtggcgggaagaccttccgggtcacgcgtgtcttccctgattgtgctggggaagtgcgcatgctcatgtcgttccaatgacgccattgctcgctcgtgacgccacgggggcggtgcctgcacatgggtggagcctcaggtcctatataaactagagcctggccaattgcgaactggactgcaatcagcttctggactgaggaaatttaactgttagggtgttttggaggtttttgtctttgttgttctgttgaaacggtttcgttctgtcgcccaggctggagtgcagcggtacgatcacgactcaccgcagcctcgtcctgggctcaagctatcctcccacctcagcctcccaagtagctgcgtctacagacatgcaccaataggcctggataatttttaaattttttgtagagacgaggtcttgccaggttgcccaggctgatcttgaactcttgggctcaagcgattctcccactttggcctcccaagcattgggattacaggcgtgagccat[136 bp omitted]caacatggtgaaaccccgtctccactaaaaatataaaaaattagctgggcgttgtggcacatacctgtaatcccagctacttgggaggctgaggcaggagaatcgcttgaacccgggaggtggaggttgcagtgagctgagatcacgccattgcactccagcctga[142 bp omitted]tctctactaaaaatacaaaaattagccaggcatggtgatgggcgcctgtaatcccagctactcaggaggctgacgcaggagaatcgcttgaacctgggaggcggaggttacggtgagccgagatcggccgtttcactccagcctgggcgacagagcaagactccatctcaaaaaaaaaaaaaaaaagtaaattacactacttttatgcaggacattagtttcaacaaataattagttgagcatctgtatgccagatgctgtgctagatgctgggggcgtggtagtaaacaaaacggagaaatcattacctttaagagctaacttgggagtcggaaacacagacgaaaaacataatactcctcggaattttggagattggttccaagaccgcatataccaaaatccgcgtatactcgtcccccagttgcccaacagaatccctgtataggaaaaatccgccctttgtatccgcaggtttcccatcctgcctccgcatttggtaggggttaaagaacccgcggatacggatggccaactgtattttatttttcgaaggccacttataagtggatggatgcaattcaaacccgcgttgttcgcgggtcaactgtacataagtaaattaaaccgtaagtgagtaggtaataaagcagtaaggtggattgggaatgccacccttggctgttggaatttttttcttttttttttttttaagaggaagtctcgctctgtcacccaggctgcagtgcagtggcgcgatctcggctcactgcaacctccacctttccggttcaagcgattctcctttctctgcctcccaggtagctgggattacagacgcccactactatgcctggctaaattttgtatttttagtacagatggggtttcatcatgttggccaggctggtcttaaactcctggcctcaagtgatccacctgccttgagtgtgagtcaccgcacccagccacattttaattgtttttgagagacagagtttatttatttatttaaatttatttatttacttatttatttttaaaaatagacttatttatttattttttgagacagaatcttgctctgttgcccaggctggagtacagtggcgcaattatagctcactgctgcagttgcagttgttaacaggctggcaagggaaggcttcctggggaaggtcatgtttgagagtatttggaagagctgtgggagagagttgtagggatatcagagggaaaagtgtcccaggtggaggcaacagccagtgcaaaggccctgaggcaggaggaaacgtcctggcatgttggaggaacattgaggaggcccatgtggttggagcagagagtccaaggaggacagaaggaggaggccaggggagggaggtgaaaaggtgcaggttttgcaggacccagtgcactttgagaaggacttggtcttcttctacgtgagtgaaatgagagccacggaaggctgtgcgccaaggaaagctggatctactcagcatttcccagcgtccccaccaagccctgctgtgccccctaaaactccctattcctggagaagctttggtgtgcacaggaaattcagggttctggactcagccaagtttgaatccccgcccctccacttaccagctggaaacattgggcatctcatttagccccctcataccccagt[223 bp omitted]gaggcaggagaatcgcttgaacatgggaggtggag[132 bp omitted]ccgaggccacaacaggcttggaacctgcttttacaggacctgggagaaagttgaggggagagcgggcagtttgtcttccatctctggccttggctgccctctgtaggacaacctgggaataaaacggtggaacccgggaatctaaaagtgcaaaaggccgggcaccttggcttaatgctgtaatcctagccctttggagacaggaggatcgcttgaggccagcagttccagaccagcagccttggccacttagagaggagaccccttctctgcaaaaaaaatggaaaaactagctgggcaaggtggcatgcacctgtggatctagctacttgggaggctgaggcaggattgcttgagcctggaaggtcgatgctgcagtgagctacgattgtgccactgcactccagcctgggcaacaaagtgagaccctgtctctaaaaataaataaataaatggctaggtgtggtggcttatgtaatcccagtactttgggaaaccgaagcggttgagtcacttgaggtcaggagttcaagaccagcctgggcaacatgttgaaaccctgtctctactaacaatacacaaaaattagccgggtgtggtggcaggtgcttgtaatcccagctactggagaggctgaggcatgagaatcacttgaacccgggaggcggaggttgcagtgagctgagatcgtgccactccactccagcttggacaacagagtgagctcccgtctcaaaaaaatatatatatacacataataaaaattaaaaataaatcaataaaaccagaagaaaccaaagcagtcagggtgagacttttttttttttttttgagattaagtctcgctcttgttgcccaggctagagtgcaatggcacgatctcagctcactgcgacctccgcctcctgggttcaagccattctcctgcctccgcctcctgagtagctgggattacaggcacccgccaccatgcctggctaattttgtatttttagtagagatggggtttcaccatattggccaggctggtctcgaactcctgacctcaggcaatccacccatcttggcctcccaaagtgctgggattacaggtgtgagtcaccgcgcctggccggggtgagacttcttgtccagctgggcttgtccaccatccagggatgggtactcctccctccaggggtgcctttccgttcccctctgaggttctcccacttttctttcttatcatgtcactactaccccagacagctttgaggagacaattgtcagatggcagaaactgaggcccacaaaaggcaacctgaggaatgtggcctctctctgggcctcagccttgaagaagagatctcccagggctgcctggctgtgccgtgtgataactccacctcctcagtgtaaggcaatcccagaaggcttcctgtaggaggagggctgtggattggccaatttttaagtatgatattaatatgaataaaataacatcaactgtttactaatatatataatttattattattgttattattattattattattattattatattgttgttattatttttgagacagagtctcactctgttgcccaggctggtgtgcagtggcccgatctcagctcactgcaacctccgcctgccgggttcaagcaattctgcctcagcctcccgagtagctgagactgcaggcgcatgccaccatgcttggctaattttttgtatttttagtagagacagggtttcaccacgctggacaggcttgtctggaactcctgacctcgtgacccacctgcttcagcctcccaaagtgctgggattacaggtgtgagccaccgcgcctggccattattatattattgtagtggtataatattgtttaccagtagctgaacaattactgaacactttctgggtaccaggccccattctaagccgtcttcttcttcttcttcttcttcttcttcttcttcttcttcttcttcttcttcttcttcttcttcttcttctcctccttctcctccttctcctccttctcctccttctcctccttctcctccttctcctccttctcctccttctcctccttctcctcctcctcctcctcctcctcctcctcctcctcctcctcctcctcctcctcctcctcctcctcctcctcctttcttcttcttcttcttcttcttcttctttttttttcagagacagggcccaggctggagtgggatcatagcttactgcagcctcgaactcccagggttaagtgatcttcctgtcttagggttaaatgatcttcctgtcttagcctcccaagtagctcagactacaggctcatgccactttgcctggctaaattttctatttttcctatagatgggttcttgctgtgttgcccggggtggtcttgaacttctggcctcaagcaatcaagcagaaagagttggaggccggagccaggcgcggtggctcatgcctgtaatcccagcactttgggaggtcgaggtgagcggatcatgcggtcaggagttcgagaccagcctggccaacatggcaaaaccctgtctctactaaaaatagaaaaattagccgggcatggtggtacgcacctgtagtcccagctactcaagaggctgagagaggagaatcccttgaacctgggaggtgcaggttgcaatgagccgagattatgccattgcactccagcctgggcaacagagcaagactccctctcaaaaaaaaaaaaaaaaaaagttggaggctgggtgtggtggctcacgcctgtaataccagcactttgggaggccaaggcaggcagatcacaaggtcaggagttcgagaccagcctggccaacatagtgaaacgctgtctctactaaaaatacaaaaattagccgggcatgttggcgtgcacctgtagtcctagatacttgggcagctgaggtaggagaatcactagaacctgggaggcagaggttgtggtgagccaagatcatgccactgcactccagcctgggcaacagagcaagactccgtctcaaacacacacacacacacacacacacacgcaagactccgtctcaaacacacacacacacacacacacacacacacgacaaaaattagccgagcgtggtggcacacccctgtaatcccagctatttgggaggctgaggcatgagaatcacttgaacctgggaggtggaggctgcagtgagctgagatcgggccaccgcactccagcctgggtgacagagctagactatgtattgaaaaaaaaaaaaatacctccctgactgtcccctgctcagggtgggttcagtacccactttgggctctgcagctttctttctttttctttttttttttttttttttttagacagagtctcactctgttgcctaggctggagtgcggtggtgcaatctcagctcgctgcagcctctgccaaccaggttcaagtgattctcctgcctcagcttccctagtagctgggattacaggtgcataccaccacgcccagctaatttttgtatttttagtagagatggggtttcaccatgttggccgggctggtctccaattcctggcctcacatgatccgcccacctcggcctctcaaagtgctgggattacaggcatgagccaccgcgcgtggcctgggctctgcagctttctgaatggccccccatcagggccccggcaggactggggatgcctggccacatgcccgtctttcccactggacgatgagcccagagagggtgggaaacgggcttagcttagtccctctgtgtccctagcgcccagcacagggtctggtacacaggaggtgctccgtggacacttgccgagtgaatgcgtcttaccatgactggggaaactgaggcacaggggtgcagagcctgccctagagaatcccaccttcactgaggctgagggagggggctgagggcttcccaagggccctggctcaagctattggtgtcactgtacagtgtgtggggacactgaggaatatgccccccgatcctggaccaggcctggactgtccttgactaacctggaggaggcaggatggaggttggtggtcctggggcccctgagcaggtggggagactgaggcacccaggtaggggtggagcagggcctggggactcaactggtggttctttgtttagtcgccagctggttgttctttgtctctctttctctctctctctcccccttatccttccttccttccctccctccctcctttcttttccttccttccttccttccttccttccttctttctttcttattattattactatttttcgagacggagtctcgctccatcgcccaggctggagtgcagtgccgtgatctcggctcactacaacctcctcctcccaggtttaagcgattctcctgcctcagccttctaagtagctgggctgacaggtgcccgccaccacgcccaggtaattttttgtagttttagtagagatgaagtttcaccatgttggccaggctggtctcaaactcctgacctcaagtgatccacccacttcggcctcctaaagtgctaggattacaagcatgagccgccgtgcccggccactgtttctctctttttttttagagacaggatcttgttcttccacccaggctggagtgcagtggcatgatctcggctcaatgcagcctcaacctcctgggctcaagtaatcctcccgcctcagcctcccaagtcgctgggaccgcaggcgcccaccatcatgcctggctaatttctgtattttttgtggagatagggtctcgccatgctgtcctggctggtctcaaactcctgggttcaagcaatcctcccacctcagcctcccaaactgctgggattacaggcatgagccactgtgctcaacctattcttcctgtttctaactcagaaaacatttctagttctttctgtatttccttctctctgtgaccctctcgaatctctcgaatttttctctgcatctctccctctctctctctctagttccccctccctccatgctcctcagtctctcccccactctgtgtccccctcttgccctctccgcagccctctcgcccaggccggatgggggtggcagcagcagggcaggtgcggccccgggctcagtgcccgatgctgccgcggccgccccggatttgtggctgcgactcctttatctgtggctgcagctgctccttatctcctggcttcaggacaggagcctgggattagggcagcccgggccaaggacgcgagatggcagggcaggcgggtgggcgggaggtggcagagagcgggggagccgggtgcgagcgcatgtccctgagtgtgtgtgcatgtgggagccagactgccgtggatgcatgacttgggggaggcctgtgtgtgtgccattgtgtgtctgcgtgattgtgtgtctgtctagtgtgttatgaaggtgcatgagggattgtgtatataccttggtggctgtggcctatgtatgactctgtatgtgtgtgtctgtgtgtttgtgtgtgggtatgcatgaatgttggtgccactgtgagttcctgagaagagccactcagccactgctatgtcccacacgagaccgcacaaccccagcccagctccctgcttgcacaaccttgctcctgagactctattcccctgccctggcctccttggtgggcctgatggttttcccaccttgctgacctaaggcccccagggacgggccccttgacctgcgacctgtggctgtaaatggtcctgtggggacagctgctggccctgttttcaccatcctcacctggaacgggccggccccttcctgccacccacaggccttgtgggtcccatccccgcctggcgggctcctaacccagctcccggggaccttgctccgggccagcctgacccccgcccgggagtgtgtctccagctctgtgtcctctgcctgagctgaggcctctgtgtgtgctcggcatgggttgggcctggggtgagagtgaccgttgaatcagtagccccaaaacatcgtttctggggagccctcagctgtcccagtgtcctgggtaagtccctttccctctccacgggagaatgacagcacccacctctggtaacatattacatgcccagtgctgggcacagaacaaacgtgggagccatttggcagatggggaaacagaccccataagctcagtcaccaacacactggaggctggggtggtgcccagtgtgctgggatggccagtgctccagccaggggacacagtgggcatccagccacctccacccccacagggctggtccccgggggtcctgaggtgcagcccaagcccccagaacctggcccaactcctggcgctaagatggaaacttctccagcagccaagtctgagtcttggccagcggcccccggcctcccagaacctctgccctggagtctccacccaagaacagatcactccctttgggagcagtggcctcctggggagggcagggggccagcctccgggaggacaggggtggagcgtggtacagtcatccagccccactttgcagctttttccttacttgtgaccttaggttagtggcttgacctctctgatccctgagtttcacaaccaccacgtgggcagagagcaggtggaggtggggtgagtgttgcagggagtggaggcagtgaacgagcagaactaatttccaggcaaacaccagaaagggcaggcaggctttgggatatggttttcagccaccgctgcacggttccacccctgcctcggccttgaccctgatgccagcaggcttgaatcagtcaaagaggtcagctgcctgggccagacacggtggctcatgcctgtaatccgagcactttgggaggctgaggtgggaggattgcttcagcccaggatttggagaccagcctgggcaacacagcaagaccccatctctctaaaaaattaagaaattaactgggtgcggtggtgcacatctgtagtcccagctacacggaggctgaggtaggaggatcgcttcagcccaggaggtcaaggctgcagtgagctatgatggcgccactgcacgtcggcctgggtgacaaagtgagaccctgtatccagaaagaaagaaagaaaacaaaaggtcaggtgccttcctgctcctctctgagcctcagtttccccatatctgtgctctgggaagaccacagatcctacacacaggctgcacttgaagaaagagaggctcagtacttggcgacatccggcccgccctgcggcagcccaagtctgggacaaaaaagatttaaaaataaagcattgtaaatacccttgtttcctgcaaatagagccagcctctgagttccctggcctcccgggcagccaagcccagacagtttcttggaaaggggtggaattcagagggctgttttttgttttttttttgggggggggggatcagggtctcgctctgtcacccatgctggagtgcagtggtatgatcatagctcactgcagccttgacctcctgggttggggtccttctgccccagcctcccaaatagctggaaatataggcgtgcaccaccacgcccagctaatttgaaaaaagttttattttgtaaagatgggggtctccggatgttgcccaggttggtctcgaactcctggcctccattgatcctcctgcctcagcctcctaaagccctgggatttcaggcatgagccactgcacctagctcacagaggggtgttaatggagagtcctggtccctgggttcctttctgggatagggggtggagggatcctggaggggcccgtgtgtccctgtgcacctcagttcccggctttggtgtgggtcagcgagtgtgacagggtgtctgtcaccgcctgtcacagggggtgagatagcatgtgggttggtgacagagagagtgtgcgggtgatttgggagggtgtcaggatggaaggaactgtgttcctggtgtgaccacatggggctgagcaaggcagggtctccgtgtcccccggtgcgacggggtctccaaccacgtgtgtggttgtttcagcgtgtgtgtccctgagtggaatggctgtagctgggcgtaggtcctcgcgtccccacctcctgcgccccgccccgccccctaccttggacacgcccctagcgtctccccccaatcccagaggaagaaccaactctttcaagtcgctgttgccggggcaaccgttttacaagcgtccacatggtgggcacatgtgtgtgtgtcctgcgccccatgtgtctgctcggcccccgcccccatggcccccagccgcggcggggagggggcacaggcggtgtggggtgagcgggaggcagtggaggggcagctggtgacagcttaatgatggagggctggggtgggggtgggctcctggccctgctgtgtgtgtgcaggggtggctgtgccttccagacggggcccggggtgtatgtgtgtgtctgtgtgtgtgtgtgggtgtgtgtgtgtgtactaaccagtgccaggcagcgtgggggtgtgtaaggatctgctgagagtgtgtgtgtgtgtgtgtgtgtgtgtgtgtgtcgggctgagtgaaccccgggtctgtgggcatgagtgcattcagaagggcgtggggtaaggaaggacccccgcaggagagtgtacgcgtgaccttgtgagatactcgtggaggggttgtgtcagcgtgtgtctgcgtgtgaggacccgggggtggggcggggtgtgacagtgcaggagtgtctgtgctcactagggcgtctaggtttgtgtgagaaggaaagataggccgggcgcggtggctcacgcctctaatcccagcacttcgggaggccgaagcgggcggatcacgaggttaagagatcgagaccatcctgaccaacatggtgaaaccccttctctactaaactgggcgtggtggcgcgcgcctgtagtcccagctacttgggaagctgaggcaggagaatcacatgaacccaggaggcgaaggttgcagtgagccgagattatgccattgcactccagcctgggcaacagagcaagactccgtctcaaaaaaaaaaaaaaaaaaaagagagatggcagggggggtgaccccaccgggaataaaggtttgagggtgtgtgtttgaggttagggtatgtgtgtcactgggagtgggtttctgggagtgaacatttgggaacactagtaatggcagacattgggacatcacccccaacttgccaggcttactcacttacttattcacatttactcattacttatacaagcttgttcacactcattcagtccttactagaacacagtgaagatctactagtaataccctgttacaagtggggaaactgaggcacgggggggaaggcccaaggccacacagaacacagatccctgttaacttccatcctagatctgggaacaggctgccacttctctgacataggtccgttctctcgtccccccacccacaactcacattccagcacgcaccccgcgcacgtgcacagcaccgcgtgcatcagcccgcgtgcagcaggaggcgaggctgcgtgagtgtccccatcaccgcgcgcactgcgcggccccgcaagttttacaggcgctttgtggggacgtgcatatgttggggttagggatcttctaggaaggcctaatctgcatgcgaacccccaggctgctggaatcagaaacatgcaggcagccagggccggagtgaggaggaggccccaagaacctcagcggcgggagcgagaaaccagagcacgggggctccaagaacgcaggcggcgcggggaggagtctgcagggcgggagtttttcggtcaccccgcggggcgggggcggggccgcagcagtcccagcccagctcagccatcccagtcccgtccccgagttagcccggcgccgccagggagcgctgtgggagcgcggagccgtcggggaggagcccgggtgggtttgggctcccctgcccgtgagccttggtgccaggagggggcgccggcgggagctaggagcgagaaatcccctgcagggctctgaggccgcactgggggacttactgcttgatggggggcgctgaggacagcgggtgtcgtcatccgtccgaggggaagactttgcgtctcagttccctggaagagctttcttgggagggggcttcttcagcttctggggaaggagaacctgggacgagattggagggggacaccccaatcctcagtggggtggggggagctgtatgcgggggccacagctgttggggtgtgggccatgggtcttagttcgccagaaggggtcgggggagcgtcttggagctccggatttaggcaagaggagccgtcaggggtccccggagtgaggatgggaaacagctagtttgaggggggcgccgctctgggggcttcccttgaggggcttctttagtgaagggacttcttggcgccttgttctctggaaggggacctgggacaggtttgggaggtctggcagaaaggtcagatcctcgatagaatgtggggggcgccaagggccacaggcactggcgtcgggacagctgcggctcttagacaccttcggagggggtgtcttggggtcccggctctcccgaaggggagccgtcggagtccccggggccgggggagaaagccgtctaaagggggctctgtggttggttcccgcgcctctgccacctgcgctcctccggtcccctccggcgggggcggggagggcggggagggccggggaaacccgagccaccgcccccagccccgcccccggccccgcccccggccccgcgccggccgagccgtccgcggcgggacgggcggaggcggcgggagagcgcgccctgaagccgctccgagtgcccaggtccctctcgccgccgccccggagccccgtgctgcgcgccgaggccgcctgcgccgtccgtgcgcccccgcgccccgcgccctctgagccgccggccgtccagggcacccacccccagccccagcccccgccggcccgggatggccgcagcccgcggctaagcgagcccggggggccccatgggccggcccgcgccgcaccccgcccgcggccgccccctccggcccgggccccccccgggcaccgcgggcccaggcggcccggatggcggtcgcggcggctggggcaggggctggggccgcgcggccgccactgacgggtagtccggcgcccacagcaggtaagcaaggggcaggcggggcaggtgggggggcagcagggtacgacggggacgacctgccccatggacggggcatggagggtgctgaggactccgagtagaccaggggattccctcctgcagcagaaccagcgggtgtatgagggtggggtcagagggacgacaggtcagcgcgtggggaggggcgggggcgtgaagccagatcctaagcggctctccaagcccgaatccagccgcggtgtccctgtccgacggggcgggcgcactcctgtctcctaaaacctccaagtgtgcatctgaggaacgcacggtgccctccccagaatccccttagcctctaggagggcgagacccagacagccctttagccatgtggtctccaaggggccgttggggggcttccggatcctgcagagcccgggcggggggctgccgtcgcggtccagctgcgcacagaagtaaacatctgtcagtggcgcgttccctgctcgccgccgccgccgccggggacacggtgtcctccggtgagggccgggccctctcggctcctggagcagcccgttcagccaccagagggcgtgaaaccctttggtgttgggggtgggggtcccttaagggcaaagcctggatgtgaagtggcgggaggctgtgcctgcctttcctgctttttataaaaggtgtctcctgcacggggatagccccgaattgtcccaggaggtggtttgtggattaggagttattaggcccaagggggctgcagacagattagtggggaggggggtgtgctggagagagaaatggctctcccagggtgaatgccaccactgtcccctccccagaacgcatccgacctgcccacaggcctgtgattacctgcagggctcgtcattggtccagatttggggagtggggccaggggcttaaagcaggggggtgcaggaggccggacccctgactttcctccctcttgcctgtctcccctgccctttccctgttctctacatccttgtccctgttccatggccctctttgtctgtctctgagtgccccgggctgaggaagcctgggtggggtgtgaccagcctcagaggatgtcagtgaggggcaggatcccacccacactgccagcttctcccacccccagcttcttgccttggggccctttggacacccctccctcctcccttcatcctaagactcccgaggttcatagctccggcaccgactccacccccagggagctacagaaagcttcttccaggggtgcagggaagaaaataaaacattcccctcttcagctgggtactgcatctgaaactccaccatcagcactggcccctcggcgtttcaggtcccagttttcagggagcgaacagaggagacagctttcaagagctgggcagaagggactcaaaaagtttgcagccgggcacaacacaatcaaaagattgtttcgacaaatgtgtgtcgatggcaaccgcgtggttgactggtgtcagggttgttgggtgctgtccttcaagggaggcagatttagacccagggacacagggctggggaagctcagagtggggatggagggctctacctcagggtaggaatgtcagagaagacttcctggaggaagggcctcagaggtggggctgtgaaggatgagtaggagttttctaagtgggaaaggaaaaggcattccaggtggctgtgcatgcaaagatctggaggcatggaatagtcaaggcaccttggtgagtgtgggagagactgttctagaaggttggcagaggaagaactgggctggggcactcaaggttgcatccctggaggtaggggctgaatacgcagatcagagaggtgcaagttgttaatgtatctggagtcactgggctggactatctttgctggggggctgtgggcttcctccgctgatgcatctccctggtcctccaagttgaggcagaggctctggggcctcaaggtggaggtggtggccgggggttggggtcgggagatggacaggaggctcccaaaccagccttgcacttgcagggctgataatggccttgaaggaagcctgaagaaagagtggatatgaatggggcatgcctgcaggaagggtgtctcggagatgatgatgttggaatggaggggtctccctgtcaaatccaaatgaaatcaggcttcaggtgagccctggaagaaatcagacagcaggcccagcttacagcatgtggccctcacttcccaagtggggaaactaaggcccagagagagggcactgttcgtgcttaaatagcgcagtgtgtcaggaaccaaggtacaatttgaatttggggagatggaaaagatgatggccaggtgcagtggctcatgcctgtaatcccaacactttgggaggccaaggcaggtggatcctttgagcccaggagttccagactagcctgggaaacatagcaagaccccctctctaccaaaaatgcaaaaattagccaggtgtggtggcatccccctctggtcccagctactcaggaggctggagtgggagaacttcttgagcccaggaggtcgaggccgctgtgagctgagatcgcaccactgcactccagcctgggtgacagagtgagaccccgtctcaaaagaagaaagacaagatgattgagctgacctgtttcccgggaaactgaagagtggttcccagtctcacccagtgttagggtttaaccttcatctggggtctgtgcctcagtttctctttccatcagatggccagcatcttgtggtgtcctggccgctcccggaggacccatgtcgctcaagccacccgctgggacctgtgccagctgcttagccatgccaggcctcattaggctgatcctgtcatcccaccccggggacccccctcctgccagctccagatgcctccgaggccagccctggggcagcctggccagccccaagagactggtgtggtcaaggtggcaactttatagcccaaccacagagggccggggccagaaatggtgggtctaagaagctggcacacacacgctccctagcctccctccccagacacagctgggtggcgggtacaggaagagagagctccaggtgccggtgggggactgcggggcactgaccctgcaggccacagggccctcgttacttcccgcctcatctccctgcattgtcccctggctcctggcactccagccacgctggtcatctcgaacaggcacggtcctgcctccgagcctttatacgtgcagctccctccgcctggaacactctttccagatcttcaatggtggcttttttttttttttttttgagacagtctcgctctgtcacccaggttggagtgcagtggtgcgatctcggctcactgcaagctccgcctcccgggttcacaccattctcctgcctcagcctcccgagtagctgggactacaggcgcccaccaccacgcccggctaattttttgtatttttagtaaggacggg[135 bp omitted]gtcagctcaaatgctttctcctctgagaagccctccttgactccccagtctagaagcagcctccagtcactatggcttcatcctgagttttttttttttttttttctgagacggtgttgctctgtcgcccagactagagtgcagtggcgcaatcatagctcattgcagcctccacctcctggactcaagcgatcctcttgcgtcagcttcctgagtagctgggactacaggtacatgccaccaagcccagctaattttaaaattttttgtagagacgggggtctcgctatgttgcccaggctggtctcaaaaccctgggctcaactgatcctcccgcctcagcctcccaaagtgctgggattccaagcatgagccactctgcacccagccccatcctggttttttttttgttgttgtttacatgctcttgacatctaattaccttatttcacatttattatctgtctccccgactggatggtgagtttgtcggggaggggcccagggtggccttggttaccaccgagtccctggtccccagccaggccctggcacacagtaggcgctcaataagtgtttgtcaggttaattcgtgtgctggaggcggaacccagccgggcactctgggctttctgccactggggccttttactggctggatctgctctgctgtgtgtctttaagaaaatctcgtacctccctgggtctcagcgccactgttctctcaaacagcaggtcctacgcccctctctcacctctcctcttttcctcttgttaacacaggccagcgggttcccaggcagtagttgtggagtccgggagagaacaagtttggagttggatccaggttccaatcccagctcagacacttgttacttttaattaaaaacatttttttttggccaggtgtggtggctcatgcctataatcccagcactttgggaggccgag[133 bp omitted]gaggcaggagaatggcgtgaacccggaaggcagagc[131 bp omitted]actcctggtctcaagcagtcctcccaccttcgcctcccgacatgctgtgattataggcatgagccaccacaaccggcctcagctgcttacttgctgtgtgcccttgaataagtcacttaacttctcttagcctcagtttccctacgtggaaaacagggctaataataataacatgtttttcagggactgtgggagaattaaatgtagaggaaagcactcatcacagtgtctgcctctaaataatggaatagccaacattgctggtgttgttattgttgttaggccag[136 bp omitted]atctctactaaaaatacaaaaattagctggacatggtggctcgtgcctgtaatcccagctacttgggaggctgagacaggagaatcgcttgaacccaggaggcagaggttgcactgagctgagatcgctccactgcactccagcctggcaacagagcgagactccatctcaaaaaaaaaaaagaatatataggttataggctgggcacggttgtcacacctgtaatcccagctctttgggagtctg[136 bp omitted]gaggcaggagaaccgcttgaaccccagaggtggggttgcagtgagccgagatcgtgcaactgcactccacagcgagacttttgtcttgaaaaaaagaaaaaaatagaggttttgcagccattgattggataataaaagaaaaaagaatatggagggaggagtgttggaagtgagtctttgaggaatgagtaggagtttgctgaccacctgtgttcaaatcccagctcagccacttaggttgtttgaatctgagcaagttacttcacttctctggacctcagttttccacctaccaaatggggataaaatagtccataccttgatacaagttactacatgtaaagtgcttagaatggcactaatagtgttgttcatgagtgttagtttcagttattattactattattattagagacggagtctcgccctgtcgcctaggctggagtgcactggcgcgatcttggctcactgcaacctccatgtccttggttcaagtgattctcctgcctgatcctcctgagtagctgggactggtggagtgcaccaccacacccggctaatttgttttttgttttttttttttgtattttcagtagagatggagtttcaccatgttagccaggctggtctcgaactcctggcctaaagtgatccacctgccttggcctcccaaagtgctgggattacagctgtgagccaccgcacccggcccagttattattattattattttatttatttatttttttgagacagagttcgctctgttgcccaggctggagtacagtggcgcgatcttggcccactgcaagctccgcctcttgggttcacgccattctcctgcctcagcctcccaagtagctgggactacaggcgcccaataccacgcccagc[146 bp omitted]tattattattattattttaccactattattatcatgaaggagccaccatactcctccccagaaaccactatccctgaccatccatccctcagcttcactttggcaaagacagacccagagtccctcaagacaagctcatgtgctgggacttgatgcccagggtagcaggaagccagcgatagttctagcagttgggcagcactcagcttctgtgctgggggaagaagaggagaggctggacctctttctccggcagacctggaaggggcggctgggggtgtctgtgtctgcaccccctgacacatgaagccacccctaggttggcctctggcccccgcagacgcagtatcggaaccagctgtgcttgccagatgttcctggtttgcccccagatgtgtgtcgccagttcgaggctgtcctggctgcctcatccctcccatggggtgggcccaggccctggggccctctgagggagggggcacatttttgtgggctgtggaatttgttttgtgttttgcagaatcactgagtcttgccttgagaggcccagacccctggccaagtcttgcccctcatggggcctcagtttctccaccagtggaacctcagggaactcctaggggcgatctaggaacaggagaccaggaggctgccctaggaacaggcccagctgtgagccctcgagctatcagcacttggggaaaacagaggcacaggcgcgcgaacacatgtatgccgcggcgttcacacacacaggcacttccccactggcatgttctggcttcacggcctggcatcctctacccatgggcagtggcaagagcacaagagccacttggtcaagctcttccaggtcctctctggctttcctacagtgctgggtggcacccttcgtgccctattgaagatgggaggccaggcatggtggctcacacctgtaatcacagcactttgggaggcaaagaagggaggatcgcttgaggccaggagttcgagaccagcctgggtaacatggcgagactttgtctctattaaaaaaaattttttttaatttaaaaaaaaaaacagatggaggctgggcacagtggttcatgcctataattccagcactttgggaggcagaggcgggcggatcacctgaagtgaggagtttgagaccagcctggcc[142 bp omitted]ggtggaacctcgtttctaataaaaatacaaaaaaattaaccaggcatggtggcttatggctgtaatcctacctactcgggaggctgaggcaggaaaattgcttgaacctgggaggcggaggttgcagtgagctgtgatcatgccactgcactccagcctccagcttgggcaacagagcaagactccgtctgaaaaaaaaaaaaagccaggcatggtggcgcacacctgtagtcccagttactcgggaggctgagacaggagaatcgcttgaactcgggagccagaggttgcagtgagctgagatcgcactgctgcactccaacctgtgtgacagagtgagactctgtctcaaaagacaaaatacaaaaattagccaggcatggtgacaggcatctgtagtcccagctgcttgggaggctgaggcaggagaatggcttgaacctgagaagcagaggttgcaatcagctgagataacaccattgcgctccagcctgggcaacagagccagactccgtctcaaaaaatatatatatatatggggaaactgagtcacaggaggaccaggagtgaaacggagaggaaggagaagtgtatgcagggcagcacccccacaggcaaaagtgtgcagacttgggatctgcagcaagctcacccctctgtaaactgaattctcaaagtcagccctgtgccctgcaaaaactcagccgaagatgtccctctagaaactcccatccagcaaagacagtcatgggcacagacaccacgcttacagggctgggcaagaggaaggcacccatggctgggggtggccaagatgggtagcagggaagggtttctggtggaggggctgtaggagctagggctttcagggtagagtaggagtttgccaaattaagataggccccaattccaggcctccccaagattagaagagatgcctacatggagagagggtccccctccctttcttcatctctcaggtgctactctttgagatcgggagttctgtaggacagaggcttttatccctgggactgggtgtgcccggcaggtgtcccctggggagttcggtgggaaggggagtgggggtgccagggcgttgcctgtgcataaagataatgagcaacatttcctggcatcaccaaggaaggtgccagaaacacacacccttgcgctggctgtctgttgctttggttgattggaagggcctgcctagctgtgtgacgttgggctgctctttgcctctctctgagtccatttcccttctttccccttccttccccagctgtggggattgtgtggcctccagctaaaagtggaggtctgtcctaggtccttcttgctgcacctcacactgctacgctcccagcccctccaggaaggaaggaggcttccctccctccaggcaatgcaggttctccaggatttctacgttttctccaggactgggaagggatctctagccaggccctgcacaggcaatgtagacggcacctgggatccctgcaggggtggacacgggcagtggtcagggcggggccgttccctcctgagtcccccggccccatctgcttcccctcctctcactctcctcccaccgtgtctgtgcgccctggaatctttgcagctgtgggcgttggtggcgtgttcacctgtgcacccctgtgtgtgtgtgtggccaggaggagggtcttggggaccttggccagagcacaaatgacaatggatgctcttgtgtgtgtctctgtgagaccggattaccacgtgtgagtggggaaaacctgtgtgtgtaagtgggatcatgcttgagtgtgagtgtgaaaacaccctggtttttcactgtggggttgttcaagtgtgtgtgtgtgtgtgcaaacaccagcacgtggatataacgtttcaccacaagtgtgaaagcactcaagtgtgtgagtgtgatttttttttttttttttttttggagacgaagtctcggtctgtcacccaggctggagtacagtggcgcgatctcggctcactgcaacctccaccccttgggttcaagcaattctcctgccttactcactctccctaatagctgggattacaggcgtgcactaccacacccggctaatttttgtatttttagtagagacggggtttcgccatgttggccaggctggtctcaaattcctgacctccagggatccgcctgcctcagccttccaaagtgctgggattacagacgtgagccaccgcgcccggcctgtttttttttttttttttttctttttgaaacagagactcactctattgcccaggctggagtgcaatggtgcgatctcgactcactgcaacctccttctcccgggttcaagcaattcttctgcctcagcctcctgagtagttgggattacaggtgcctgtcaccgtgcctggctaatttttgtatttttagtagagatggggttttgccatgttggccaggctggtctcgaactcctgacttcaagtgatccacccgccttggcctctcgaagtgctgggattacaggcgtgagccactgtgcctggccgatggtgtcttttaaaaatttattattttctatttttgtagagatggggtcttactatgttatccaggctggtctcgaacttccaggctcaggcgaactccccgcctcagcctcccaaagtgctgggattataggcgtgagccactgagcctggccgagtttcaccagtatttctgctaacgtcctttctctgtcccagggtccatccaggatcccagatgacatttagccatcccctttcctttggcccctccaatctgagactcctcctccatctgtctttgtccttcatgaccttgactctttttgtcttttctcttctcatcttcttttcttttcttttttcatttttgagacggagtcttgctctgtcgtccaggctggaatgcagtggtgcagtctcggctcgctgcaacctccgcctcccaggttcaagcgattctcctgcttc[137 bp omitted]tggcctcccaaagtgctgggattacagacgtgagccaccgtgccccgtcttgtcttcttttcttttctgagacagggtctccctatattgcccaggttggtctcaaactcctggcctcaagcaatcctcctgccttggcctcccaaagtgctgggatcaaaggcatgagccaccttgcccagccagtgagtgttttgaatgaaggtggaagcgtccaagtgtgtgagtgtggtcatgtttgagtgtgactgtgaaaacgccctagcatgtgagcacgacgtattcaaatgtgagtgtgagaacacactagtggattcatgcggtggtgttctggtgtgtggatgtgattgtgttagaatatgtgagcctggaaacatctgagtatgcatgggatcatgtttgggtgtaagtatgaaaatactggctgggtgcagtggatcacacctggaatcccagtgctttgggaggctgaggcgggaggattgcttgaggccaagagtttgagaccgcctgagcaacacagtgaaacccagtttctaccaaaaaacaaaaacaaaaacaaaaacaaaaatatagcgaggcatggtggcacacacctgtggtcccagctacttgggaggctgaggcaggaggatcacttgagcccaggactcagaggttgcagtgagccgaggttgcgccactgcactccagcctgggcaacagagcaagattctatcaaagaaagagagagagagggaaggaaggagggaggaaaggagtgagggagggagggaaagagagagggagagagagaaagagagaaaggaaggaaggaagggaaagagagaaagagaggaaggaaggaagggaaagagagagagaaaggaaggaagggagggagggagagagagaggaagaaaaagaaagagaaaggaaataggaaggaaggaagggagggagggagggagggaaagagaggaaggaagggagggagagagagagaaagaaaaagaagaaggcaggcaggcaggcaggcaggcgtgtgagtgtcatcatggtcaaatgtgtgattgtgtttcaatgcgtgtgaaaaagtccaagtgtgtgtgagtgtgaggacaacccaggatgtgtgtgtaaccctgtttgagtgtggaaatgtgaaaacagtgaatgtgggagtgttttgttttgtttcgtttccagacggagtcttgctctgtcaccaaggctggagtgcagtggtgtgatctcagctcactgcaacctctgcctcccgggttcaagcgattctcctgcctcagcctcccgagtagctgggattacaggcgcacactgccacacccggctaattttttttcttttttgagatggagtctcgctctgtcgctcaggctggagtgcagtggggagatctcagctcactgcaacctccacctcccaggttcaagtgagtctcctgcctcagcttcccgagtagctgagattacaggcgcccaccaccacacccggctaatttttgtatttttagtagagacagggtttcaccatgttggccaggttggtctcgaactcctgacctcaggtgatccaaccgcctcagcctcccaaagtgctgggattacaggtgtgagccactgcacccagccaaatgtgggagcgtttgagcacgcaagtgtgctcgagtgagaatgcttgagcatgtgagtgtgatcgtgtgtgggcagtgtgtgagtgtgtgagtgtgtgtatacgagtatgaaagaacctgagtgtgaggatatgagatggctgggtgtgaatgagtgtgagtgggcacacaagtgtaagcctgacagtgtgctgtgtgagatggggcatctcgctatgttgcccaggctggtcttgaactcctgggctctggcagctgtgggtgctggcagcgtgttcacctgtgtacccctgtgtgtgtggccaggatgaggggtctcagggcacagatgataacctgagctagattgcaaatgacagtgggcactcctgtacctacaaatgtgtgtctctatgcagttggacaggtacagatgcctccctaggttagggcctccgggacacaggaacacgcattgtgcacacccagccccctccccgtgccctccgccacacccacatcacccccacctggtcgcgtccgtgccagagacaaaccagttaggtggcccccgagaacagagaggcccattgttcatggctgctaatcagccctgcctgctgggccccctccgccaatggccccccgatttcctgccctccaccagagctctaggtggggagagtctgaagctccaaggcctccagggggtcctgtgaccaggccatgctggggctaggcccttggtagaaacagaccaccacagcccaagacttgttccaatccaatggggaaactgagtcacaccactccaagacttgaatgtgtgggcaagcagggtggagggggtccagagaggtccggggcccgggtaggtttcctgcctgtctccccctcctaccaccagcattcaaatgctggctctatgaccttggacaagtcacttcccacctctggacctgtttcccattcatgcagtggggataagggtattacttgcagccaggcgcagtggctcatgcctgtaatcccagcactttgggaagccaaggcaggaggctcgcttgagcccaggagttcaagaccagcctgggcaacatgatgagacatcgtctctacaaaaaatataaaaattggtcaggtgtggtggctcacgcctgtaatcccagcacttggggaggccaaagcgggtggatcacctgaggtcaggagttcaagactaacctgaccaacatggtgaaaccccatctctactaaaaatacaaaaaattagccaggcgtggtggcacatgcctgtagtcccagctacttgggaggctgaagcaggagaattgcttgaacttgggaggtggaggttgcagtgagccgagatcatgtcattgcactccagcctgggcaacaagagcaaaattccatctcaaaaataaataaaaattttaaaaaataaataaaaattggctgggtgtggtggtgcatgcctgtggtcccagttacttgggaggctgaggtgggaggatcacctgagctgggtaggttgaggctgcagtgggcgctgtgattgcaccactgtactccagcctgggcaacagagtgagatcctgtctcaagaaagaaaaaaaaaagtgggggtattacctgcttcttaggacgcttgtaaggttggaatgactatatctgtgttaagtttgtaaaatggggttggacataaagtaggtgatcattaagaataaaggggatgatggccaggcacggtggctctcgcctgtaatcccagcactttgggaggctgaggcgggtggatcacaaggtcaggagatcgagaccatcctggctaacatggtgaaaccctgtctctactaaaaatacaaaaatttagctgggcgtggtggcagacgcctgtagtcccagctactcaggaggctgaggcaggagaatggcgtgaacctgggaggcggaggttgcagtgagccaagattgtgccactgcactccagcctggg[131 bp omitted]gctaacacggtgaaaccctgtctctactaaaaatacaaaaaattagctgggtgtggtggcgggcgcctgtagtcccagctactctggaggctgaggcaggagaatcgcttgaacccaggaggcggaggttgcagtgagccgagatcgcgccactacactcagcctgggcgacagagtgagactccgtctcaaaaaaaaaaaaaaattacttagacatggtggcacattcgtttaatcccagctacttgggaggctgaggcaggagaatcgcttgaacccaggaggtggaggttacagtgagccgagatcgcaccactgtgctccacactccagcctgggcaacagagtgaaactctgtctcaagaaaaaaaaaaaaaaaaaaaaaaaaaaaaaggaataaaggggatgggtttgacatctgacaaaatgctgctgctgccatccgcttctgcaaaacctcaagaatgaaatgtccttcccatggcccacacgaggccctgcacgagctgcttcatccccttccaaacctcctctcctctctcttcccctcctcactctgctcagacacacgggcctcctcactgttcctccaacacgccacgtgtggtctgccccagggcctttgcacaggccatgcctctgcctggaacacctgcccccagattctcctatggctgacttctcacacttgggtcttagtgcatgcatcacctcctcagggagggccccctgcccacccccagtgaatctagccccattcaggacagtcatctttattatgcactgattgtatactaagcccagagacttcaactgtggtttctttttcatcctcccaataaatccatccatccatccgttcactcagacatgaaattctggaccctccaattcaggatctgggccacccagtgcctagcttttttttttttttttttttttttttttgcgacagagtttcattctgtcacccaggctggagtgcagtggtgcaatctcagctcactgcaacctccgcctcccgggttcaagcgattctcctgcctcagcctcccgagtagctgggattacaggtgtgccaccacgcccggctaatttttgtatttgtagtagagacggggtttcaccatattggccagactggtcttgaacacctgacctcaggtgatctgccctcctcagcctcccaaagtgctgggattactacaggcatgagccactgcacccgtcagcctagcttctttgtgttcattcattcattcattcatcattcagcaaatgtctatgagcgcctactctgagccactgaaccagctgggctggccctgggggagaatcgacttcccctgcaaattcactctcatcagatccccaggctggtctaggatttgtttagatgccctcacgttggggaactcattccttactaagaataaccaccaccaataccaaacagtctcaagtaccaccaatagtgctgagttctcagggtgactacagcatctgctcccaagcccagcccagcccatatggtgtgtgctgtgtcaaagaacctgggttcaaatcccatgtccttttctaacccttggacaagcccctacccattttgtgcctcggtttccctagctgtaaaatggagatagtagtgcctctcttgtgggctcagcaccaggcctgttacacagctggtgcttaataaatgtgtcctgttacttaaggtctgatatgtgtagctcctgtcgtcgccgtccatgggggtgagtggggtggggaaggggtggtttgagtttctgcacatcaggacacgaggcgcggtccatgcaaatgaaatgcaaatcccatgcaaataaatctctgggtggtgcagggcagcgtgcaaggctggaggtacaaggtgcacgcatttggggggcgcctgggaaccccatgagccgagcccaggcccggaggtgctgacccgcatccagcccggctttcagtgctcggtgtaaatgtttacacctggccggccgccaggctccacgccgccccacactaggcagccgggagggggaatgtaaactcgggctgggggccgcgggacgctcgggaggagcccagacggcgtcgagtgtggtgggcgtgtacacgtgagttattaaacaccgactgtatgcagtgaggaggatgccaccaggcactcacagcaccaagtaactggtgcccgaatgggtaaagctcagggcattcctgggggcccactagcgcccctgcaccagccagaggttgaagtgaatagggtaggcagccatggaaggctccctggaggaggcaccctccaagctgagattgcaaggggagtgagagctaggtacagtgactcacgcctgtaatcccagctctttgggaggccaaagtggaaggatagcttgagcccaggagtttgagaccagcctgggcaacgttgtgagattcccctctctattaaacaaaaacaaaaacaaaaaaaattaaaaattagccaggcacggtggctcatgcctgtagtcagtcctagctacttgggaggctgaggtgggaggatcgcttgagcctaggaggtggaggctgcagtgagctgtgatcacaccactgcactccagcctgggtgacagagcaagaccctgtctcaaaaaaaaagaaagagagagagagaaagaaagaaaggaaagaaaggaagagaaaaagaaagagagaagaaagaaagaaaaaggaaagaaagaaagagaaagagagagaggaggctgggtgcggtggctcatgcctgtaatcccagcactttgggaggccaaggtgggcggatcacttgagttcaggagcttgagaccagcatagctaacagggagaaaccctgtctctattaaaaatacaaaaattagccagtcatgctggcaggtgcctgtaatcccagctactcggggggctgaggcaggagaatcgcttgaacccgggaggcagaggttgcagtgagctgagattgcgccactgcactccagcctgagggacaagagtgagactccatctccaaaagaaaaaaagaaaaagagaaagaaaggggagtgggagtggggagggagggaagaagtgttctccatgcaaggacctatctgtgcaaaagcccagagctgggactccatgtccagggcagctctggtccattgctgcccacttctgggcctgcttatccatctggatgggaaacaggctcagagaggggcagagtcaatggaggacaccagcatgtagggaacagtgtcagccccagattcctgcctccagactgtcctaaacaccaccctccccgcgcctttgtcccacactgccacctgccgggaatgacctctcctcctttcactcttccccctggctcctcagctgcagccgctccggcctccttgctgttcctgggatacgccacactcagtctggcctcggggcctttgcactggctgtgtcccctgcctgtgatgccattctcctctgcctggccaactcctacgtttattcaagtctggaccttgtcatcggctcctcaggaaggcactccgggacccccagatgggggcggttccctgtgactcctggcacggaggccaaccccttccttgttcaatggttccttgagggaccattcccatgtgattatcgaccattcggcaggcgttcaaagtcaaaggccccacactgagtcctggcccagcgccctgtgcccgttggctgctggagggacagacggggcgtgcggctgaccatcccgtgcccgcaggctgaggatgcagcgctggaaggcggcggccttggcctcagtgctctgcagctccgtgctgtccatctggatgtgtcgagagggcctgcttctcagccaccgcctcggacctgcgctggtccccctgcaccgcctgcctcgaaccctggacgcccggattgcccgcctggcccagtgtaagctcctcctctgtgtggggtcagatacccccaacgtaaggggtagaatttcaggcagtggagtgggaggtggtgggggggtgtcataggttttttaaagatagggccagccagcccccttgcagggaggcagggacagacatcctaaaagattattcagggcaaggcatggtggcgcctgcctataatcccagcactttgggaggctgagacaggaggatctcttgagcccaggagttcatgaccagccagggcaatgtagcgagaccgccatctctacaaaaaacttcagaaattagccaggtgtagtggcgcacgcctgtagttccagctacttgggaggctgaggtgggaggatcacttgagcccaagagttcaaggctgcattgagctatgattgcaccactatactccagcctgagcaacagagcaagattctgtctcaaaacattataataataaatacattttctaaaaaaagatggggtggagggaggttgcaaattcccccaatggcctggtggagctagggtgacttctgggaactggggtctttcggctcagctgtcacaaggaattaggctctgccctgaggtcccgtgggggccagatggagattagacctgggcattcgcctggttggcccccgcggcgcagcagggggggcggtgggaggagagagaggctggatctgaggtcccagtgacctgccccaggggacagggaccaaggggaggcgggagatggagcaggagctaaaaaccggaagaaaggcccagagattcgaaggggtgaggaggggtggagagaggagagacggggctgggggcacagacacgggcaaaagtgctgctatagggacacagaaatgcccaccctgagggcaagaccctcgcccaactccccaccaatccctaatgcctgccccaccgcaggtgctgtggggtgagggtggtgcgtgggccctgacccctgtgcccacgcacatgtccatgcgtgcgcctgcgcgggcatctgaggcgtggatgccggcagggtgcgtgtgcagcgcctttgggtgtgggccacgagtacgcccatgtgcgcgtctgcgcccgcccctgccagcccacacaatcctcttttcttgtccttacaatgcacaagggtggcctccagcacgagctccacttctgtcctcccaccacttccctctctgcaagcggcgtgaagtccttcctaggactctgggacagagacccgggcgggacccccaaaatccagtgctccaggacttggggtgcggggggcaaagcacgaatggaggaatttcaggcactgcggagggtcagggcccatgggcgggtgcctgtctgccctactgcaaaaagcgagtggccactgactccccaagtccccatgttctaggctcctggtggaatttcaggctggggaccttgtgttctagcccctgtgcaagcagccagccccgctgcagggaggcagggacagacatcctaaaagatgattcattgttgccaggtgcggtggctcacgcctgtgatcccagcactttgggaggccgaggtgggcggatcacgaggtcaggagatggagaccattctggctaacactgtgaaaccctgtctctactaaaattacaaaaaaattagccgggcgtggtggcgggcgcctgtagtcccagctactcgggaggc[144 bp omitted]ttagccgggcacctgtattgtatcgggcaagcccacaaatgtctgcttcgatgcacccctctggggttgggtgtgccccctaaccccccagcacagtcctggccactccagtcctgctccggggcttaaagaacacggactaggttgctcagtcatcgcccaccccccgcaccgatttcccaccctctcagccccggccaagacagagatcatggaagcttcatgggacagacagggaaactgaggcctgaggttgcaagtggcgaaagtggcagagtcatgctctgaggctgggtttgtctcgtttctgagaccccctgtgggaacagacatctcctcccccaccaaaccccaggagacagacagcccctccttccccagggccacccagaggctcattcttttgacagccaggtgcaccagcccggggggcaggtggggactaaagatttcctctcccaaccacaagcgtgactgccacctgctctggggctgggagtcccctgcctgcaggtccgccagcagcgctgcctgtcattccagcgtctgcagttctctcccggggcttccgagtttgggggtggagccaccgcttgggtaataaatttaggctgccaggccctgggaatcggtgacttgggcacctcctggcgagtgtgggagaaagcggctggacctgggccaaacttgggtgaacgatgaaggcaggaagaatgacctttaagcccgcctctgtcgctctctctcggccacctgctaatgatgtgaccttgggatggtccgttttgtcacctgtcacatgggggtggccttgacagtagctgctgccactccatggagtggggtccccacacaggcttcggatgcagtaggctgcggtacctgctgctcctctgcattctgagaaacccaaacaccccgattcatttcttggatagggaaactgaggctccactgcacagcggggcagtggggatggagggagtctgaaaagcccggggcctcagagcagacgtcggggcctgaagagggggctctagagacctatgacaacctcactaaagagggatagggcatgggaagcagccccccagtgctgcccagagaggatgcaccagtgtcctggggcagcccagcataggggcggggtccagatagatttgcgatggaggacgaggagaatggagcagcaatggggtgagagaggggcccagaggaggtgagttagagaccccggtcagctcagctcaaggtgagacgggctggaaagcggcccagaaaggatggaccaggttctgggcagccaatataggctcagggttcagaaaggggttttggaccagcgtaggggtgtgagtgtgtacgtgccccccagtgccgcccagagagggtgcatgagcagctcagcaagagggtggggaaatttgggacctgggagtgagacgagaagccgtctaggcctggcgtcccagcaagggtcttcgtttgcaggggtacagagagggtagggggctccctcccaccccctgcacccactgaccccccctcctttctcttcctcccctcgcagaccgtgcactcctgcagggggccccggatgcgatggagctgcgcgagctgacgccctgggctgggcggcccccaggtccgcgccgtcgggcggggccccggcggcggcgcgcgcgtgcgcggttgggggcgcggccttgcgggctgcgcgagctggaggtgcgcgtgagcgagctgggcctgggctacgcgtccgacgagacggtgctgttccgctactgcgcaggcgcctgcgaggctgccgcgcgcgtctacgacctcgggctgcgacgactgcgccagcggcggcgcctgcggcgggagcgggtgcgcgcgcagccctgctgccgcccgacggcctacgaggacgaggtgtccttcctggacgcgcacagccgctaccacacggtgcacgagctgtcggcgcgcgagtgcgcctgcgtgtgaccctacctcactcggccggcgcggcggccactccccccgcctcgacggcaccactggccggccccgcgaaagactgcgcgtgcgtagagcacgccggcgcggccccgggactctcgcgataactgtactgagataaagtgtggcaactcgagctggctggtgattcatcctcggcgaggggctcgcgtgtgggccacgtcgccgtctccaccgggaaagcggggaccagtggggggggcccagctgcagggtagtgggaggatgctgtttgctttgggggaagggtagatgcaaagtgggtccagtttatggcggacaaaaaggaaaatggggtgaatggggctatgttggcagggaccgtccttcctgcctccctacgggtccctctgcccgtcccgagcgtgttccggtccgcacctcttcgctgtgtgggcttctggggaggggaaagggaagctacgctcggatgaagagaccgaggtctaggtggaccccgtttccccagcttgttcccttccgcacctctccgcggtgcgggcttctgggatgaagacactgaagtctaggtgggcccagtttccccagattgtcgctgactgcacctctcgcttctgggatgaagagactgaggtctaggtggacccagtttccccagcttgttcctgactgcacctctctgctgtgtggacttctggagagggggaaagggggagacactgtgggtgaggagcctgagatccaggtggaatcagttccccagcgtctccctgtccgcactgatcccgctatgtgggtttctaggaagggggagccactctgggggtgaggagagtgaggtccaggtggacctgggcctcccttatccgacggcctcctcgggccggtcttcgcccaccagggtgagctgaaagccactatctccttccaccagctactaaaaatacccgcacgctgcccacctcccggcggggagaggcctggggcgggcgccagccccatccagcccgaagccggcgcctgctggtgtagagctgggtccccagagacctgggtcctcggcccataaaagccctggccgggcctccacgggggggatttacgacgagcccctgcggagtatggaaaaagcccggctcggtgtttagatttccccacggtgtcaccttgatgcttggcaggcctcgggtgttgggttgccagagcgcgggaggggtcggcgggtcccacggtcggtctgaggggcggggaaggggcgggcactgcgagcccagagcaggcaccggcgaggcgagactcctcccctcctgcccctcagactgggggttcccaaggctacaacccttctccttagctgggccccctcccctccttcccacacgtctgcccttaggaccaccctctaaccacagtgtcccttcccaggctcagcccgcatccccccaccccccgcaaagctggagggcgcagatcggaaaccgcccccagggagaatcacccagccatgaaggaacatccctagcccctggctcccggggacccacagctacagctggagacactcaaggcggctaatcagcaggacttccagggagccctgagagcagggcttggcggccaggcgggtgatctgcttgggaagcagtttcagggctgccgctggctggggtccccgcctacccccgcagtcttctgactctgaggtttaaggtggtggattcctccaccctttgggccgactcagcccggcctccgcagagaggccggagttcccagacgctgcggaagcccaagtgacgcttactccgagcctcagtttccccatcctagatggcctggcctcagagaggagtgttgttcagcccaggacacacagcgagaaagctgaccatcaggggtctgccgcccccccgaagctcccctgccacagtgtgcatgtgtgtgtgagtgttgcccaccctccggggcctcccggacctcggccttcctgtctcccacccagatccagcgtcccaaccacagggcgcgggcccagcccaccagggaattggaacataaataaaccgagaagcccctgcagttccctggggctgcggttgtcatcagcgcatcggcacaccggatgagggtctctctcacacacacacacaagcacactcacaagacacagagatcaccacccataagggctcagcaggcaggacccatgatcctacacagtcaccttccacacagaattgcacactcagaaagggacactcccccctttttttttttttcttgagacagtctcactgtgtcgcccaggttggagtgcagtggtgcgatcatggctccctacaacatctgcctcctgggttcaagcgattcttgtgtctca[149 bp omitted]tggttcaagcgattctcctgcctcagcttcccaagtagctgggattacaggcatgcaccaccacgcccggcaaatttttgtatttttagtagagacgggtt[132 bp omitted]tctggaaacggtgcggtgattatctctctgcacccctcacaggcggctaacaacatcacaaacaaatcagccagaaccatcactcatgggtggggccccatgggtgccagttcccagggcccagtgccctccagggtgaggtccccagcaggtgaggctcctagcaggtgagattcagtgtggaaggtctctgggagcaggtcccagcaggtaaagtccccaacagccgaggtccccagtaggcaaagtccccaggagacatccccagcaggccaggcttccgcaggggacgctcctggaagccagcatgtgaaatcccaggtaagggacatacctggccaccgaagactccagcaggtgaggccccaggaaagtgaggacccaggtaggtgaatccccaggcaggtgaagctgcaacaggtgaccgtcccaggcaggtgagtcctcaggcaggtgaagcttcaggcaaacgagtccttaggtagatgaggcccccactcaggtgaggccccaggaaaatgaggttcctggcagcccaggccccacaccagcctctcaggtgaaccaagccgctatgccgcgtgtctggtacctggattcctcctgcagtttccagcaggccttgcagaaagcgagtgcccagctgaaggagcgaggccgcagcgtctcccgccagcgaaagtagctcaggtagcgggcgtggtccttgtccagctcctgcaggtaccgggccaggtccttggggctctggaagtcgtccacgtggatgaaggcgtcgggtggcaggaacctctcgtagttgcttctgctggggcccagcaccacgggcacggcccaggcctccagggcgttcctccacagcttctcggtgatgtagtcggggtgcaaggagttctcgaaggccagatagaacttgtaccgggacagcgtctccatcatggttccctggggcaggggcttgtgggagcgtccgtacacgtccaccttgagatgggcctgcaggctctggtagtagcgcaccctggcggagtttggcccccagttggacactgcccaggccaccagctcggtcttggccgagaggttgagcggtgggtgggcaggctggccggaccacggctccagccagccgtagggcgtgaagatgtcggagtcgctgcggtaggacatggtgagattgaagtatccgtccatggctttcagctgccagcagtggcttggggactccatgctgaaccagatccatcgctgcccctgccgcctcggggagcgtgggagctgggcactggggttgtacatgacctctcggtggtgcacgatgaccgcgtctgcctgtggatacaccttgcggtcggcagtgatgttgcagtcagccgtgccaggcaccatctctgagcagcggggcagagctatgggtttgttaaaaggccacgtccacagcaggatcagggggatggagtgggcgggggtccctgtgctgtctgggaagcgggacccattagggtacacagtgggatcgtcttgagacacacgcagataggagaagaaacacacagccatcagcagctgaaacagcagcgtggtcagacagcagcgccacgaccactgtggcttggccgggcccaggggatccatgggtcagagtatctgggaagtggggagagaggagtgagggtcattgatgacaatctcctgcttaccaaagctccaggccatgagtcctgagaagagctgttattattcctgttacacagatgagaaaactgagaccaagtgactcacagcaaaagtcagcacagctggtgtttgaacaaagggagcttggcccagagtccacttcctcccacccattagacaacaggccctttctacatgggcaagggtccctggggaagttgggagaggccccaagggccctcaggtcccaccttgatcctgtccttttctggtgtgtccccagactcttcctcaatctggagagaagacacagccgatcataaatgccccccagtgcccctgagtcgaggcttgaacccatgactctgctggggaagggcacaatgggattgggttttggaggtaatataagagctcaccagatagagtagacctgtgggaaagggtgctcctggcagaggaaaccaccattgccaaggcctagtggggagagacccctgagcagtttgcagagaaagcaaaggaagtactcagggctgccagtgtcgagttcatattagattggtgcaaaagtaattgctgtttttaccattgaaagtaatggcagccatgcgcggtggttcatgcctgtaatcccagcactttgggaagccgaggcgggcagatcacgaggtcaagagaccagcctggccaacgtggtgaaaccccatctctactaaaaatgcaaaaattggccgggcgtggtggcgtgtgcctgtaatcccagctacttgagaggctgaggcaggagaattgcttgaacctggggggtggaggttgcagtgagccgagatcgcaccgctgcactccagcctgggcaatggaattctatcttggaaaaaaaaaaaaaaagaaatattaacttgggtcaagcacggtggctcatgcctataatcctagcactttgggaggctgaaggtggatcacttgaggtcaggagttcgaggccagcctggccaacgtggtgaaacccatctttactaaaaatacaaaaattagctgggcgtggtggcgggcacctgtaatcccagctacttaggagcctgaggcaggagaatcacttgaacccgggaggaggaggttgcagggagccaagatggcaccactgcactccagcctgggacacagaatgagattccatctccaaaaaaaaaaaaaagaaagaaatattcactcggggtttcattcaataagcactcagggccgggtgcattggctcacgactgtattcccagcactttggaaggcagaggagggcggataacttgaggtcaagagtttgagaccagcgtggtcaacatggagaacccacatgtctactaaaaatacaacaattagctgggcatggtggcacatgcctgtagtcccagctactcgggagacagagacatgagcatcacttgaacctgggaagcagaggttgcattgagccaagatcacaccattgcactccaacctgggtgacagagcgagaccctgtctcaaaaagaaaaaaaaaagagagaatagaaatattcactcagggtttctttcaacaagcacccaaaggttactcctctggtaggctgacgctgggggagaggtggggacagataggagggagaataggcaggcgtggggaccgataggagggagaataggcaggcgtggggactcacatgctgaccaggagggcagtggggccacccagagacatggggaacccccaggagagaagcaggctttggtggaacttgctgagcctggcccgtcctggagatacccagcagcggactggccccagggggctggagggagacaggggagggcccaaatcccccggagtgt[223 bp omitted]ctgagccatgagaatcgcttgaacccgggaggcggaagtagtgagccacctggatcacaccactgcactccagcagcctgggcagcagagtgagacgctgtctcaacagcaacaacaaaaaaaacaaaaacaggaggaaaccttcaaagagatggtgctgtggaggaggtggcgggaaaccggggccaccttttttcatgtatggggtgagacttggaggctgggagggacccttggaccatgataaggacctgctgccgctccctggacactgctgcgtctgacaccttctgggagatgctagagggactcggggatctggagacaggcctttcttctaaaagaggatgcactggatcccgtctggatgcccgtgacactgcaaaaagccagagacataaggggactgtgtccgtgaacctcaacagagcctggccactgagcctcagctttgaaggtctgaaggtctggccaatctcactccattcctaggtccttcccgcccccatagggtgtcacagagtcctccagaccccagatcctgacctcgggaacagaaatccaagaccccagccctgcccctctctgttccttgcagccctacagctgtccattctacagatgaggaaactaaggctcagagagacacctatgtgtcctgctgagtacacacaactagagccattttgatccagaccccaaagtctccccaccttaatgtcaccccaaactcctctaggactttgcagatggagctgacatctcccgaataaccttgtcccacagaactttctgtgatgatgggccgggcttggtggctcatgcttgtaatcccagtactttgggaggctgaggtgggcggattacctgaggtcaggagttcaagaccagcctggccaacatgtctctactaaaaatacaaaaattagtcaggtatggtggcaggagcctgtaatgccagctactcgggaggctgagacaagagaattgcttgaacctgggagacagaggttgcagtgagccgagattgcaccattgccctccagcctgggtgatgagagtgaaactccgtctcaacaaaaacaaagcaactttctgtgatgacggaaatgttctctacatgcagcatcaaaattggtggccaatgagcccttcaaaagtgaccatgctgtcggaaaaacagaatagttaatgctaattttttttttcatacggagtcttgctctgtcgcccagactggagtgcagtggtgtgatcttggctcactgcaacttctacatcctgagatcaagtgattgtcgtgcctcagcctctcgagtagctgggactacaagtgtgcaccatcatgcctggctagtttttgtatttttagtagagacggagtttcactatgttggccaggctggtcttgaactcctaacctcaggtgatccacctgcctcgcctcagcctcccaaagtgctgagattacatctgtgagccactgtgcccggcctggctaatgttaattttcttttcttttcttttcttttttgagacggagtttcacttttgttgcccaggctggagtgcaatggcacgatctcagctcactgcaacctccgcctcccgggttcaagcgattctcttgcctcagcctcctgagtagctgggattagaggcacgtgccatcatgcctggctaatttttgtatttttagtagagatggggtttcaccatgttgtccaggctggtcttgaactcctgacctcaggtgatctgcctgcctcggcctcccaaagtgctaggattacaggcgtgcaccacggcgcccggcccaatgctaatttaaacttaaaaatagatactggccgggagtaatggcttacacctataatcccaatgctttgggcggctgaggtgggaggatcgcttgattccaagagtttgagaccagcctgagcagcatagcaagacctcaagacctcatctctacaacgaattttattatttattattattattttgccagacatggtggcctgtagtctcagctactcaggatgctgaggcaggaggatttctggagcccagaagttcaaggctgctgtaagccatggttgcactattgcacttctgcttagacaatagaatgagaccgtgtctcaaaataaataaataaataaataacaacaaaaaataaaaacacagaaaacaaaaaccacaaaaaagcacacaagaaacagatactcaaaaagaaaaaaagcaatgactggtattacaggcagtaattgggaaacttttgagtaccttcagaacatcttggatgggcaaatctacttcttcacctgtactttttatgtttgtttgtttgttctgagatggaatcttgctctgtcacccaggctggagcacagtggcgtgatcttggctcactgcaacctctagctcccgggctaaagtgattttcctgcctcagcctcccaagtagctgggattacaggcgccccccaccacacccaggtaatttctgtctttttagtagagatggagtttcaccatgttggccaggctggtctcgaactcctgacctcaattgacccgcccacctcagcctcccaaagtgctggggttacaggcatgagtcaccacgcccagcctcattttatggaaactaaatacagattgagtagttatgacagacattgaatgtctgaattgtcttctgagggtaaaatgcacactagattgccaagatttaggatgaaaaacagaatgtcagatatctcaataaaactttttaaaggccaggcacggtggctcatgcctgtagtcccagcactttgagaggtgg[135 bp omitted]gaggcaggaaaatggtgtgaacccgggaggcggagcttgcagtgagccaaggtcgcgccactgcactccagcctgggcaacagagcgagactctgtctcaaaaaaataaaataaaataaaataaaataaataaactgagttggtctaaaccttatggtgcatagcggagctccaggcatggtgacctaggtgtgatgagaagggattgagagcacaagcgcataccaaagttctggaaaaagactcaagagacagccctcgagggacactcagagcccggactgggagggaggttgaattttaaccaagtattcctttgtgctgtcgggctcttgggctgccagtgaaaggttaatgtttagagatacatttaatattaatatattatcatgtggcccctgggtttatggcgacctcttcctaggagacagtgaagtctttgccggtgaccttcaggaggggagattgggggaaacggggaacgggagtccaggagagagatctcacccaaggtactttccctggaaaatgatcgatccacgccacaaagatcaggatgcaaaaaaacaaagccagaaagcaaaccgcattctaagccctcttttaccaccgggagtggcagaggcagagaaaatccggggccaggaaggatgaaggggtgtaggctgctgatggggtcggggggcacgggattctaccgcagagctctgcaagagagacagacagacacccacttcctcctggtttggcaaatcagccagacctcccatatcctcagcccacctcggtgcatccagaaagacccctgcctgcgactaggggctgctggccaaatgccaggccactgcacagcctgcagaccctcccccagggatcttgtgccagcccacccgcactctgaattacagcagacaggactgaggctgaggggaggaggctcggagccaggaggcctttccctggacccatgcgatccgggttgggggtgaaagtgggacaagaggccttacctgggggggccagtgtgcagagggccctagagctgagaggccgcggacggagtaacagctggattctgaggacgtggaagaggccacaccacgcagcagaaggaaggaggaagtgtacccggagctgaaaccaggccctttccaaccaccacacctgtcatcaggtgacccagggcatcctgtcctggagcccggacatcctttgaaaacaaatcgtggggctcccctaatccccgttgcagaaccaaacagggtgaagggatttggagactcaggtcatgcatgaccttgccccacctgtggcttcaatgcgatgtggctttgagtacaaagtgaaaaggctgacctgaaccaccggttcccaaagcgggttccacagggacaccaggggttccttgggaggtgggaatgaggaagtgagcagaatttctacctttccgctttccttcccaccagatcccaccttctcactcagttggcccatcaccaaatatttcctgagcactaagtgccaggccaagggatcttgcaggaaaccggtgggcaagtcaggcaactcatgaaccttggaagggaactttcttcaattaaaattgcagccttttgaataaaaaagggatggaagggcattccagttacaaggaacaaccttcgcaaaggccctgaggcagcagaaatgcaggcatgttgaggaactgcaggaggagtctcagcaggctgggtcttcaccactggagaggaggcagagctgttgcagaggctgggccacggtcagccatagggtgttcagcaccaaggcaatagggagccatgtgaggcttcaagcagaggggttaccatgtcgatacatgttttcagatgctctcttctggtaggctgggcacaggtcccatattggtggcagaagcttcctccggtggcctcaacaagcccctctgtgtgcctcaaagccacttcctttccccacccactcctgcagggcagtgcaaagcagaagtccagggagctatgcaaacttcctggaatggagagaaatgatctggaatactggttttgagggaggatgaccttaaactctctcactcccaagctgggtgcaaaggtgaccgagctcaaagcccagcctccaagtatcacgactgccctgttctagaaatcatttctgggaggctgcatcatgctgcctgagttctactatctcagtgcccagccacgcccagaccagtgaggttctgggaggtagggatgggccagggggttggggtctcccagagctccagaagtggcaacctaattccactcatgtctcattccttgactggtgaggttgactgtaacttattaaaaaaatgacttctgggggccgggcgtggtggctcacgcctgtaatcccaacactttgggaggccgaggtgggcagatcacgagatcagaagatcaagaccatccatcctgactaacatggtgaaaccctgtctctactaaaaatacaaaaaaattagccaggcgtggtagtgggtgcctgtagtcccagctacttgggaggctgaggcaggagaatggtgtgaacccgggaggcggagct[136 bp omitted]ggaaggagaggcaggaagatcgcttgagcccaggagtctgagaccagcctagggaaaacagagatacccctatctctctcttttttttgagatggaatcttgctctgtcactcgggctggagtgcagtggcacagtctcagtttactgtaacctatgcctcccgggctcaagcgattctcatgccccagcctcccgagtagctgggactacaggcgcgtgacacggcactgggtaactttcgtatttttttaatagagctggttttcgccatgttagccaggctgatcttgacctcctgacttcaggtgatctgtctgcctcagcctcctaaagtac[132 bp omitted]ctcctgggttcacgccattctcctgccccaagtagctgggactacaggcgtccgccatcacgcccagctaatttttttttttttttttgtattttta[146 bp omitted]aggtctctagtgagggacagtagggctctagtcattccatcgatgtgatcgctgggcaaagggagggtggaggaccttgggctgacctcagggatggtgccagagagaacgtgtgctcatcctgaaactgctgtgtgacttgagaggtttcctggtcctctctgagcagggctcaccataccagtgccaggtgggacctccctgccaaggagctgagcccagagcccagagtagggtatcatgaggacctcttccctcaggctcagggcaagctaggacctgcttgaggcttgcaggggcagttaggccatctgtgcacctcgttggggtcttggccctcattggaccctccagtgccttccctggccagggctgggtgggagatggagctgccagcctgctggaaatttttctccccctggggcccagggctgggagccaagggcagctggtgcccaggaggagggagaaggccccacgggctgggcgtgccatgaaccacatgtgagatccggggcatacagggaggcaatgggggtttgagggcagtgctggggttccagagggggcaggccagagccccccaacatcggccaggtggctgggcctctgccctcgtgggacccagggagggtttccatgtccctctaagcctcagaggaaattccagaggcagagaaagagaagttgggaaagggagctcttcactctgacatcagctgaggtagaggcggagaccacaggggctccaggggcgtcagaggacagagcagcctgtccccacacctcttaccccctggggactgggcctgccccagcctgttaggaagccctggcctggcctgccgagggccccgtccccctcccaggacccgtggcttgcagccaggtggtggggagaggggcccaggtgtgtggtgtgggtggcaggtgagtgatgggcccagcaaggctggctcaggcccggggtcaccagagggtttggtagagactcttcaggccccccacaccctccccaccctatgcccctccaccctcccacctgggcctcagggaggcatcacaggcacctctgcacctccactgtacagatggggaaactgaggctcagagagcacctgggattcaccaccaccacccacgtcttggtctcccctggcaattttattttactttattttattttatatatatatattttttttgagacggagtcttgctctgtcacccaggctagaatgcagtggtgcaatcttggctcactgcaacctccacctcctgggttcaagtgattctcgtacctc[134 bp omitted]ccacctcctaaagtgctgagattacaggcgtgacccattgcacctggcctattattattgttatttttgagatggagtctcactgtgtcgcccaaaccggagtgcagtggcgccatctcagctcactgcaagctccacctcctgggttcacgccatcctcctgcctc[179 bp omitted]gccggcctattattttttatttagagacgtggtcttgctata[136 bp omitted]cccagaatatttggaatgttccagaagtcctcatttacagtcgatcccacctgtaccctataagtggtggtcctgggcttgaacttggacctgtctgaactctgagctcttaacccctgaggtgagaacctggggtgagctcttaacccatgggaccaacccctctagagtgaggagacacgtcatcatttttccttgcagtattacatctggaaaccgtgccgtgatgatctctctgcacccctcacaggcggctaacaacatcacaaacaaatcagccagaaccatcactcccgggtggggccccaagtaagccagttccccagggcccagggccctccagggtgaggtccccagcaggtgagattcagtgtggcaaggtctctgggagcaggtcccagcaggtaaagtccccgaccgccgacatcctcagtaggtgcagcctccagcagccaaggtccccagcaggtgaggtccccagcaggtgaggtccccaacaggcgaggtccccagcaggcgaggtccctagcaggcaagtcttctggaggggagaggctcctggcagccgtgaagcccagcgtgtgaggtcccaggtaagagagagggttggccacaaaggactccagcaggtgaggccccaggcagatgaggttcccggcagcccaggcaccatgccggcctctcaggtgaaccaagccgctatgctgcgcaccgtctggtacctggattcctgctgcagtttccagcaggccttgcagaaatccagtgcccagctgaaggagcgaggccgcagcgtctcccgccagcgaaagtagctcaggtagcgggcgtggtccttgtccagctcctgcaggtaccgggccaggtccttggggctctggaagtcgtccacgtggatgaaggcgtcgggtggcaggaacctctcgtagttgcttctgctggggcccagcaccacgggcacggcccaggcctccagggcgttcctccacagcttctcggtgatgtagtcggggtgcaaggagttctcgaaggccaggtagaacttgtaccgggacagcgtctccatcatggtccccttgggcaggggcttgtgggagcgtccgtacacgtccaccttgagatgagcctgcaggctctggtagtagcgcaccctggctgagtccggcttccagttggacaccgcccaggccaccagctcggtcttggccgagaggttgagcggtgggtgggcaggctggccggaccacggctccagccagccgtagggcgtgaagatgtcggagtcgctgcggtaggacatggtgagattgaagtatctgtccagggcttccaggtgctggcagttagggggtggctccaagttgaaccagatccagcgctgcccctgcggcctcggggaaggtgggaggcgtgacttagggttggacatgatatcccagtggtgcacgatgaccatgtctgcctgtgggtacaccttgcggtcggcagtgatgtggcagtcggctgtgccgggcaccatctctgaacagcgggacagagccacagggatgtggaaaggccatgtccgtagcaggatcaggagggtggggcgggtgggagtggtgtcctgtcgggaggacccactgggagccctaggggatccagtggcatcgtctcgggacacacgcaggtaggagaagaaacacacagccaccagcagctgaaatagcagtgcggccagacagcggcgccatggccattgtggcttggctgcacccaggggatccatgggtcagagtatctgggaagagaggagagaggagtgagggtcattgatgacaatctcctgcttaccaaagctccgggccatgagtcctgagaggagctgctattattcctgtttcacagatgagaaaactgagaccaagtgactcacagcaaaaatcagcacagctggtgtttgaacaaagggaccttgtcccagagtccacttccttctacctattagacaagacctttcctggaatccccgaagtcttccccagtctactgaaatacaagtgccctggaggcaggggagaaggcatagccggtcatcattgcttcccatgtcactgaggcaaggcttgaatccatgactcagccagagaaaggtacaatgggactgggttttgcaggtaatatatgagctgaccggccgagcagagtggctcacacctgtagtcccagcactttgggaggccgaggtgagcagatcacctgaggtcaggaatttaagaccagcctggccaacatgatgaaaccccatttctactaaaaatacaaaaattagctgggtgtggtggtgcacacctgtagtcccagctacttgggaggctgaggcacgagaatcacttgaacccaggaggcggaggttgcagtgagccaagatgacaccactgcattccagcctgggtgacagagggagattgtgtctcaaaaataaataaataaataatagccgggtttggtggctcatgcctgtaatcccagcactttgggaggctgaggcaggtggatcacttgaggtcaggagtttgagaccagcctggccaacatggtgaaaccctgtttctaccaaaaatacaaaaataagccgagtgtggtggctcatgcctgtaatcccagctgctcgggaggctgaggcatgagaatcacttgaacctgggaggcagaggttgcagtaagctgagatcatgccactgcactccagcctgggtgacagagcaagattccatctcaaaaataaataaataaataatttttttaaaaaaagaccagcctgggcaacatggcaaaatcccaactctactaaaaatacaaaaatttgccgggcaaggtggcatgcgcctgtagtcccagctacttgggggaattgctttagtctggaagtttgaggctgcagcaagctgtgatcatgccacttaaccccagcctgggtgatggagcaagaccttgtcttaaaaaaataaaataaaaggctgggctcggtggctcacacctgtaatcccagcactttgggaggctgaggtgggcagatcccaaggtcaggagatcgagaccatcctggctaacatggtaaaaccccgtctctactaaaaatacaaaaaattagccaagcgtgatggcgggcgcctgttgtcccagctactactggggaggctgaggcaggagaatggcgtgaacccgggaggcggagcttgcagtgagccgagatagtgccactgcattccagactgggggacagagcgagactccatctcaaaataaataaataaataaataaataaataaataaacataaggtaatacacgaaaaacttttgacttacacaccttaaatggattcactgtatgggttgcgaattatatcccgatgaaactgttttcaaatgacatggtggttgcctgctttctctgttggaccgaactggtctaagccttgcagtgtcgagcggagctccctgtaggtcacctgagtgtgacgaaaagggatcccgacgccaagacctaagttcacaccaaggttctggaaagagactcaaaacacaggccctcaggggacagcctgagcccagagtgggagggaagttgaactttgaccaattactgctttgcacccttgggctctggggcctcaggcacgaggtaaatttttataatgtaactgatattaagatggaattacgtcagccctggatatatggcagcctctcctaggagacaatgaagtctttgtcagtgaccttcaggagggtagattgggggaaacaggtgattggtgggggcgattttcaggcctctgagcccaagctaagccatcatatcccctacgaccggctcatatacgttcaaatggcctgaagcaactgaagatctacaaaagaagtgaaaatagccttagctgatgacattccaccattgtgatctgtttctgccccaccctaactgatcaatatactttgtaatctcccccacccttaagaaggttctttgtaggccgggcacggtggcccaagcctgtaatcctagctctttgggaggccgaggcgggcagatcacgaggtcagaagatcaagaccatcctggctaacacggtgaaaccctgtctctactaaaaatacaaaaaaaaattagctgggcgtagtggcgggcgcctgtggtcccagctactccggaggctgaggcaggagaatggcttgaactcgggaggcggagcttgcagtgagccgagaaagagccactgcactccagcctgggcgacagagccagactccgtctcaaaaaaaaaaaaaaaaaggttctttgtaattctccccacccttgagaatgtactttgtgagatccacccctgcccacagaacattgctcctaactccaccgcctatcccaaaacctataagaaccaatgataatcccactaccctttgatgactctctttttggactcagcccgcctgcacccaggtgaaataaacagcctcgttgctcacacaaagcctgtttggtggtctcttcacacggacgcatgagacatttggtgccgaagacccgggtcagcgggactccttcgggacagcagtcccctgtcctcaccttcactccctgaagagatccacctacaacctcaggtccgcagaccaaccagcccaaggaacatctcactgattttaaattgggtaagtggcctcttttactccttctccaacctctctcactatccctcaacctctttctcctttcaatcttggcaccatccttcaatctctcccttctcttaatttaaattcctttcattttctggtatagacaaaggagacacattttatccgtggacccaaaactctggcgccggtcacggacttgggaaggcagccttcccttggtgtttaatcattgtggggacgactgcctgattattcacccacattccatttgtgtctgatctccgcggggacacctgccttggtcattcacccacatcccttggtggcaagtcaattgcagggacgcctgctttggctgctcaccttaccccttctctccgtgtctctaccccttctctactttcctgaggggcaagcaccccccaccccgtttccattttcctggggggcaagcacctcccatcccttctccactttcctgggggataagcatcccccaccccttctctccgtgtctctacccttctctttaaacttgcctacttcactatgggcaaccttccaccctccattcctccttcctctcccttagcctgtgttctcaagaacttaaaacctcttcaactctcgcctgacctaaaacctaaatgtcttattttcttctgcaatgccgcttgaccccaatacaaaccagacagtggttccaaatagccaaaaaatggcactttcaatttttccatcctacaagatctaaataattcttgtcataaaatgggcaaatggtctgaggtgcctgacgttcaggcattcttttatacatcggtccctccctagtctctgttcccaatgcagttcatcccaaatcttccttctttccctcctgcctgtcccctcagttccaaccccaagcgttgctgagtcttgaatcttccttttctacaaacccatctgacttctcccctccttcccaggctgctcctcaccaggccgagctaggtcccaattcttcctcagcctctgctcctccaccctataatccttttattacctcccctcctcacacccagtccagcttacagtttctttccgtgactagccctcctccatctgcccaacagtttcctcttaaagaggtggctggagctaaaggcacagtcaaggttaatgctcctttttctttatccgacctctcccagatcagttagcgtttaggctctttttcatcaaatataaaacccagcccagttcatggcccatttggcagcaatcctgagatgttttacagccctagaccctgaaaggtcacaatgccgtcttattctcaaaatgcattttattttattacccaatctgctcctgacattaaataaagctccaaaaattaaattccggccctcataccccacaacaggacttaattaacctcgccttcaaggtgtacaataataagagtagaggcagccacgtagcaatgtatttctgagttgcaattccttgcctccaccgtgagacaaaccccagccacatctccagaacacaagaactccaaacgcctgaaccgcagctgccaggggttcctccagaacctcctcccccaggagcttgctacaagttttggaaatctggccaccgggccaaggaatgcccgcagcccgggattcctcctaagccatgtcccatctgtgaaggacccccaatgaaaatcagactgttcaactcacctggcagccactcttttgtttagtttctcagttcatacaaaaccgcatccaggccatcaccaataattctatacgacaaacactccttctaacaaccccacaatatcaccccttaccccaaaatcttccttcagcttaatctctcccactctaggttcccacaccaacccctaatcccgctcgaagcagccctgagaaacatcgcccattatctctccataccaccccaaaaaattgttgccaccccaacactttaccactatttcgttttatttttcttattaatataagaagacaggaatgtcaggcctctgagcccaagctaagccatcatatccccagtgacctgctcgtatacatctagatggcctgaagcaactgaagatccacaaaaaaagtgaaaatagccttaactgatgacattccaccattgatttgtttctgccctaccctaactgatcaatgtactttgtaatctccccccaacccttaagaaggttctctgtaattctccccacccttgagaatgtactttatgagattcaccctctgcctgcaaaacattgctcctaactccactgcctatcccaaaacctataagaacaatgataatcccaccaccgttgctgactcctttttcggactcagcctgcctgcacccaggtgaaataaacagccttgttgctcacacaaagcctgtttggtggtctcttcacacagacatgtgagatcgcgatgaggactgagatcccaccccagttgaacccaagatattttttcctagaaaaagattaaaaaatgctactctgctgagacatcacaaagatcaggaagcaaaaagcaaaaaaatagctgggcgtggtggctcatgcctgtaatcccagtagtttcggagagtgaggtgggcagatctcttgagcccaggaattcaagacctgcctgattggccgggtgcaatggctcatggctgtaatgccagtacttgcggaggctgaggtgggcaggtcacctgaggtcaagagtttgagaccacccttggcaacatggtgaaatcttgtctctactaaaaataaaaaattagccaggtgtggtggcaggcaccttaatcccagctactcaggaggctgaggcacaagaattgcttgaacgagggaggcagaggt[137 bp omitted]aaaattaaaaagtatccaggtgaggtggcacacacctgtagtcccagctactccagagcctgaggcaggagggtcactcgagcccaggagtctgaggctgcagtgagccatgattgcatcactgcactccagcctgggcaacagaccaagattctgtctcaaagaaaaagaaaaaaaaaatgcatcttaagtccaccccaggcagggcagggccagagagaatccaaggccagaaaagatgagtggggggaggctgttgatggggttggggtgcagaggggactccactccagagctctgccagagagagagacaaacgtcactctttccttccggtttggcaaatcacccagaaccttccatgtcctccccaacggtggtgcatgccacacccagaaagacccctgcctgtgactagggggtgctggccacattccaggtcatggacagtttggtgactctccaccgggattttgtgccagcccagccacatcatgaatcagggcccataggatgggggccgaggggaggagggacggagccaggaagcctttcctgggaggtctcccaggcattctgggtggggggaaaaggtagaatgggataacttacctggagaggcagcgagcagtggatgaggacagctcaccaggaggccatggcaggtttcctggggcggggaggaagtgggaacagagaagaggaggaacaagtacgtgtacattgcagcacacacctgtcaccaggtgacctagggtgttctcccctgcagcagggatattgtctggaagccagtttccggggtgtcctaatctcgcctgtgagaccggataagggtgcaggaacttggaggcccgggacgtgacccgggctccatctgtagcctgaaggctgcctggctttgggtgcacagctggtccatccataaagtgaaaacgctggtctaaagctttgattctcaaagtgggtcccacgggggccccatgggtttctcgggagatggtaaagggagagaagtgagcagaattttaaccatcccacccattcagtcagtcaatcaacaaacattgcttatgcacctattgcataccagacccagggagagtgcagggagcaagtgggtgaatcagacaatacatgacttttgtaagggaacaattcttcaggcctctgagcccaagctaagccaccatctcccctgtgacctgcacgtgtacatccagatggcctgaagcaactgaagatccagaaaaaaagtgaaaatagccagttcctgccttaactgatgacattccaccattgcgatttgttcctgcctcaccctaactgatcaattgactttgtgacaatacaccacccccttgcaataatgtactttgtgatattcccccgcccttgtgaacatactttgtacaatataccctcgtcacccttgagaaggtgctttgtaatatcctcctccctgcccttaagaaggcactttgtaatattctccccctccagcccttaagaagatactttgtaatattctcctcacccttgagaatgtactttgtaagatctaccacctgcccgcaaaaaattgctcctaactccactgcctatcccaaacctataagaactaatgataatcccaccaccctttgctaactctcttttcggactcagcccgcctgcacccaggtgattaaaaagctttattgctcacacgaagcctgtttggtagactctcttcacacgggcgagtgtgacatttggtgccgaagacccaggacaggaggactcctttgggagaccggtctcctgtcctcgccctcactccgtgaggagatccacctgcaacctcaggtcctcagaccaaccagccgaaggaacatctcaccaatttcaaatggggtaagcagtcttttcactctcttctccagcctctctcgctacgcttcaatctccctgtccttccaattccagttatttttcctctgtagtagagacaaaggagacacattttatccgtgaacccaaaactccggcgctggtcacggacttggaaagacggtcttcccttggtgtttaatcactgcagggacgcctgccctgatcattcacccacattccattggtgtctgatcaccgcgggggacgcctgccttgctcatcacccacattcccttggtggcaagtcaattgcggggacacctgctttggctgctcaccccccaaagccccacttctccgtgtctctacctttctacgggcaaccttccgccctccattcccccttctcccttagcctgtgttctcaagaacttaaaacctgttcaactcacacctgacctaaaaacctaactgccttattttgcaatactgctaggccccaatacaaactcgacaacggttccaaatggccagaaaacggcacttttgatttctccactttacaagacctagatgatttttgttgaaacatgggcaaatggtccgaggtgcctgacgtccaggcattcttttttttttttttgagacggagtctcgctctgtcacccaggctggagtgcagtggcgcgatctcggctcactgcaagctccgcctcccgggttcacgccattctcctgcctcagcctcctgagtagctgggactacaggcgcccgccaccatgcccagctaattttttttatttttagtagagacggggtttcactgtgttagccaggatggtctcgatctcctgaccttgtgatccgcccaccttggcctcccaaagtgctgggattacaggtgtgagccgccatgcccggccgcgtccaggcattcttttacacactggtccctccctagtctctgctcccaatgcgactcgtcccaaatctttcttctttctctcctgtctgttccttcagtctgcaccccaagctctgagtcctttgaatcctccttttctacgaacccatctgacctctcccctcctccccaggctgctccttgccaggcagagccaggtcccaattcttcctcaacctccgctcccccaccctataatccttctatcacctcccctcctcacacccggtctggcttacagtttcgttccgtgacacagccctcccccacctgcccaacaatttcctcttagagaggtggctggagctgaaggcataggcaaggttaatgctcctttttctttagctgacctctctcaaatcagttagcatttaggctcttttccatcaaatataaaaacccggcccagttcatggcccatttggcaacaaccctgagatgctttaccaccctagacccagagggaccagaagaccgtcttattctcaatatgcagtttatcactcaatccgctcctaacattagaaaaaactccaaaaattagattccagccctcgaaccccacaacaggacttaattaaccttgccttcaaggtatacaataataaaaaagatacagccaagtggcaacgtatttctgagttgtaattacttgcctccgctgagagagaaacgccagccacatctccagaacatgagaacttcaaaacgcctaaaccacatctgccaggcattcctccaggacctcctgccccaggatcttgcttcaagtgccggaaatctggccactgggccaaggaatgcccgcagcctgggattcctcctaagccgtgtcccatctgtgcaggaccccactggaaatcagaccgtccaactagcctggcagccactcccagagcccctggaactctggccccaggctctctgactgactccttttcagatcttctcagcttagcggctgaagactgatgctgcctggtcgcctcggaagccccctggaccatcatggacgccgagcttcgggtaactctcacagtggagggtaaggccatcccctgtttaattgatatgggagctacccatccacattacctttcttttttttttgagacagagtctctctctgtcacccaggctggagtgcaacggagcaatctcggctcactgcaacctccacctcccgggttcaagggattctcctgcctcagcctctcgagtagctgggattacagatgcccgccaccacacccggctaatttttgtatttttagtagagatggggt[141 bp omitted]cccccataactgttgtgggtattgacagccaagattcaaaaccccttaaaactcccccactctggtgccaacttggacaacattcatttatgcactctttcttagttatccccacctgcccagttctgttattaggccgagacattttaaccaaattgtcttcttccctgaccattcctggactatagccacatctcattgccgcccttcttcccaaaccaaagcgtccttcgtgtcttcctcttgtatccctcccaccttcacccacagggaggggacacccctactccctccccggcaaccaatcacacgcccgttactatcccattaaaacctaatcacccttaccccgctcaatgccagtatcccatcccacaacaggctttaagggaactaaagcctattatccctcgcctgctacagcatgggcttctaaagcctataaactctccttacaattcccccattttacctgtccaaaaactggtcaagtcttacaggttagttcaggatctgcaccttatcaacaaaattgtttttcctatccaccctgtggggaccaacccgtacactcttttgtcctcaataccttcctacacaactcactattcagttcttgatcttaaagatgcttttttcaccattcccctgcacccctcatcccagcctctttttgcttttacctgggctgaccctgacacccatcagtcccagcagcttacctgggctgtactgccacaaggcttcagagacagccctcattacttcagccaagctctttctcatgatttactttctttccacccctttgcttctcaccttattcaatattttgatgaccttctactttatagcccctcctgcaaatcttcccaacaggacaccctcctgctcctccaacatctattcttaaagggatattgcgtatccccctccaaagccctgatttcttcctcatccgttacctacctcagcataattcttcatgaaaacacacgtgttctccctgccgatcatgtccggctgatctctcaaaccccaacccctcctacaaagcaaaaactctttccttcctgggcatggttgggtacttttgcctttggatacctggttttgccatcctaacaaaaccattatataaactcacaaagggaaatctagctgatcccatagatcctaaatcctttccccactcctctttccgttccttgaaaacagctatagagactgctcccacactagctctccctgacttagcccaaccctttttccttacacacagccgaagtgctgggctgtgtggtcagaattcttatacaagagccaagactgtgccctgcagcctttctatccaaacgacctgaccttactgttttaggctggccctcatgtctacatgtggcagcagccaccactttaatacttctggaagccctcaaaatcacaggccaggctccacttgccctctacagttctcacaaccttcaagcgttaatatcctcctcacacctttcacacctactgtctgcccctcgactcctccagctctgttcactgtttactgaaaccccaacagtaactattgcctatgggcccgatttcaacccagcttctcacttaacacccaacacaagtcctgaaccacatgactgtgtttccctaatacacatagcatcttccccctttcctcagatttctattcttccaattccaaacccaggccacacttggtttatcgatggcagtgcttctaaacccaatcaattttcaccagctaaagctggatatgatgtcttgtcccacacctttattatcgaagctgctgcacttcctccctccaccacttcccaacaagccaaactaattgctttaactcgtgcgctctctcttgctaacagaatgcacattaacatttacactgactccaatatgctttccacatcctccataaccatgctgccctctgggctgaaagaggcttccttaccacacaaggctcttccatgatcaatgcctccctaataaaggccctccttaaggttgctctcccgccggccatggctgcagtcattcattgtaaaggacaccagaaacctactgatcttattgcaaaaggaaatgcctatgtcgacaggacagcaaaagaaatagccaatgcctccacacctgccaatattccagcccccgctccagagggccagtatttttccacaaaagaagtgaaaatagccagttcctgccttaactgatgacatcccaccattgtgattggttcctgcctcaccctaattgatcaattgactttgtgacaatacaccctccctgcccttaagaaggtactttgtaatatcctccccctgcccttaagaaggtactttgtaatattctccccgcccatgagaatgtacttcgtaagatccaacccctgcccgcaaaaaattcctcctaactccaccgcctatcccaaccctataagaactaatgataatcccaccaccctttgctaactctcttttcggactcagcccgcctgcacccaggtgattaaaaagctttattgctcacacacagcctgtttggtgactttcttcgcaccgacgtgcgtgacacaatgtttgcagaatatgaaggtggctgtcacgtggtctgggcttcctggaggtttgagctgggagctgaagccccgtaggagttctgtaagtcaaaagggaagagaagagcattccacgtagagaaaagaatctgtgctccaggcgcggtggctcacgattgtaatctcagcacttggtgtcaggcctctgagcccaggctaagccattgtatatcccccgtgacctgcatgtatacatccagatggcctgaagcagctgaagaaccacaagagaagtgaaaatagccagttcctgccttaactgatgtcattccaccattgtgatttgttcctgtcccacctttactgatcaattaactttgtgacatttcttctcctggacaatgagtctcatgatctccctacccagcaccttgtgacccctgcccctgcccgcaagagataaccatctttaactgtaactttccactacctacctaaatcctgtaaaaactgacccaccccctatctccctttgctgactcctttttcggactcagcccgcctgcacccaggtgattaaaaagctttattgttcacatgaagcctgtttggtggtctcttcacacagacacgcatgacattttgggaggctgaggcgggtggatcacctgtagtcaggagtttgagaccagcctggccaacatggtgaaaccctgtctctactaaaaatacaaaaattagccgggcgcagtggtgggcacctgtaatcccagctactcagtaggctgaggcaagagaatcgcttgaatccaggaggaggagattgcagtgagccgagatcatgccactgccatccagcctgggtgacagagacgctgtctcaaaaaaaaagaatctgtgcaaagcagaggtccaggcgcattagaggagctgaaggaaactctaggctgggtcttcacaagcggaagatgagacagtgctgcttctggggctgagccacatccagccatggtcaatggtggcatgtttagcaccagggtgataggaagccgtgcaaagcttcaagcagtggggttgctttttttttttttttttgacacagaatctcactctgtcgcccaggctggaactgcaatggcatgaccatgactcgctgcagcctccacctcccaggctcaagcgatcctcctgcctcaggctcccgagtagctagggctacagccatgtgccactatgcctggctaatatggtttattttttgtagagacgaggtctcgctatgttgcccaggctggtttcaaactcctgagctcaagcaatctgcccgcctcagcctcccaaagcactgggattacaggcgtgagccactgcgctcggccatttttcttttcttttttttttttttttgagacaaggtctcactctcatccaggctacagttcagtgtggcgatcatagctcactgcagcctctaactcctgggctcaaatgatcctcctgccttagcctccctggttgctagcagtacaggcgtgcaccaccacgttaatttttaattttttttttttgagatggagtcttgctctgtcttccaggctagagtacagtggtgcaatattggctcctccgcctcctgggttcaagcgattctcctgcctcagcctcttgagtagctgggactacaggcacatgcaaccacgcctggctaatttttgtatttttagtagagatggggtttcaccatgttggccaggctggtcttgaactcctggcttcaagtgatcctcccacctcaatctcccaaatccctgggattacaagcgtgagccaccgcacccagccaggttaccatattaatatgtggtttgagatgctttatcaggacatgctgggcacaggccatcgggacagagcagaggagagcggggaggaagaggaggctgttttcaggtgtcctggcaagcggtgagggtcctctgccccagagcggtg[132 bp omitted]ccaacatggtgaaaccccatccccaccaaaaaaaaaaaaaaaaaaatacaaaaattagccaggtgcggtagcaggaacctgtaattccagctacttgggaggctaagacaggagaatcacttgagaccgggaggcgggggttgtagtgagccaagattgcgccactgcactctagcctgggagacagagcaagactccgtctcacaaaaacaaaacaaaacaaaaaacaaaagccctccctttccccaccctctcctgtaaatcacaggagaagtccagggagccagataagcttcctggaatggagaagagaaatgatctggaaggctgtccttgagacaggatggccttcaactctgtcagtcccaaactgggtgcaggggcgaccgaatctaaggtccagcctccatgtatgatgtcttccctgttctagaaatcatttccaggaggctgcttcacgctgcctggggttccaccatctcagtgcccagccaggcccaagacagtggggaagattgaggggacagggctgggccagggactggagtctcccaggcaggccatttccagaaggggtgacctaagtctgctctctgctcatgtcctcgctgggggcattctctgtgactgattaaaacaacttgtggggttatcagtcttggtatcactttgtcctggtgttagaggaaaggggttccaatcagaccccaagagagggttctgggatctcacgtaagaaacaattcagggctagtccctagagtaaagtgaaagcaagtttattaggaaagtaaaggaataaaagaatggctactccatagagtagccctgagggccgctggttgcccgtttatggttatttctttttttctttttttgagacggagtctcactctatcgcccaggctggctggagtgcagtggtaggatctcagctcactgcaacctccacctcctgggttgaagcgattctcgtgcctcagactcctgagtagctgggactacaggcgtgcgccacctcgcccagctaatttttgtatttttagtagagatggggtttcaccatgttggccaggctggtctcgaactcctgacctcaggtaatccacccaccttggcttcccaaagtgctggaattacaggagtgagcaaccacacctggcctgaaccaccgtgcccagctggttatttcttgatgatatgctaaacaacggggagattactcatgcctcccctttttagaccacatagggtaacttcctgatgttgccatggcatctgtaaactgtcctggtgctgctgggagtgtggcagtgaggatgccctgaggtcactctcatcaccatcttggtttgggtgggctttgaggatgccctgaggtcactctcatcaccatcttggtttgggtgggctttgaggatgccctgaggtcactctcatcgccatcttggtttgggtgggctttgaggatgccctgaggtcactctcatcgccatcttggtttgggtgggctttcaccggcttctcaactgcaacctgttttaccaccaagggctttatgacctgtatcttgcgccgacctcctgtctcatcctgtgacttagaatgacttaaccacctgggaattcagcccagtgggtctgagcctcattttacccagctcctattcaagatggagttgctctggttcacatgcctccgagagtggagccccagccaagcccggatgggcaaggcttccgccccacacagctgtcctgtggatgtgaagacaggtcctgagagagggtgttcattgctgagtcacttggagtttccaaggtagcaggctgtctccagctggacaactgcgctctctgccccctgcctcctgcctagttcccgttcttcagggcttaggtgcagacagctcccctaggaagcctccacagatagcggccctcttccagccagatcaattccttccactggctcctgcaactgcctctgtctcccctgtcctagctcaggccacactgtgtcccttctttcccctgctgggctggcagcctcgtgaggacagaaaacctagaagagcaagagatgagggaagctggagtgagaaacccgagggtaggtctctagcggagggccacaggactctgcccattccacagttgtgatcaccaggcaatgggaggctgggctggctgaggcaatggtgctcctcctgcctcaggcaatggcaatgggggccaagtccacactccaggctgagctccaatcacacctgaggccagactctgcctaagccccaacagcaagaaagtagaggttggtaaatgctttcttgggtcattttttttttttttttttttgagacagttttgctctgtcgcccaggctggagtgcagtggcacgatcttggctcactgcaagctccgtctcccgggatcacgccattctcctgcctcagcctcccaagtagctgggactacaggcgcccgccaccacacctggctaattttttgtatttttttgtaatagagacggggtttcaccgtgtta[131 bp omitted]cacatctgccctttcctgcgtgtcctgtccctctacagggactggaaatgaatcccatgcttttttttttttttttggacagagtctcgcactgttggagtgccgtcgcccagtctcagctcactgcaatctctgcctcccaggttcaagtgatcctcctgcctcagccccccaaggagctgggactacaggcacatgccaccacgtccggctaatttttgtaattttagtagacacggagtttctccatgttggtcaggctggtctcaaactcctgacctcaagtgatccgcccacctcagccttccaaagtgctgggattacaggtatgagccaccgtgcccggccacatgctccttttgacagagcagggcagaagacagattcctggtgaggtcaccccaccccactcaaatgtggtcattaccgcactggcactgtcacccgtggagcccctgccctgtccccaagatccgccctggcagctcacggcccacatctgattggccctcaccctgaatcacttcttgtgtcctttgaactggttccctcctcctgtaacatccaaccccagtccaccttgttcatgtagccaggagttgggagggctgcgggtggggattgggattgcaacccaggccccttggccatcagatccacaactggactagcctccagccactgagatctggaagaggagctgcggcgaattgccagagacagtgtgtgcttatcttgaaattgctgtgtgacctgagagattccctggccctctctgagcagggctcatcaggctagtgccaggtgaggtctccctgtcaaacagctgagcccagagcccagattgggggatcacgaggacctcctcgttggggtctctgccctcatcagaccccccagctcctccctcagcctgggctgggtgggtgatggagcagctgccagcctgctggaaatttttctccccgtggggcccagggctgggagccaagggcagctgccgctcagaaggagggagaaggccccacgggctgagctgggtgcgccatgaaccacatgtgagatccggggcatacagggaggcaatgggggttgggagccatcctggggttccagagtgggcaggccagggtcccccaacgttggccaggtggctgggcctctgcccttgtgggacccaaggagggtttccatgtccctctaagtctcagaggaaattccagagggagagaaagagaagttgggaaagggagctgttcactctgacatcagctcaggtagaggtggagaccatgggggctccaggggcgtcaggggacagagcagcctgtccccactccaactccttacccccagcggactggccccacaccaccctgttaggaagacctggcctggcctcccgtgagcccctgatcccctcctgggacccctgacttgcagccaggcagtggagagaggggcccaggtgtgtggtgtgggtggcaggtgagtgatgggcccatcgaggctggctcaggcccggagtcacaagggggtttgacagagactctccagtcccctcacaccttccccaccctatgcccctccaccctcccacctgggcctgggggagccatcacaggcacctctgaggcatgtccactgtgcagatggggaaagtgaggctcagatagcaccggggagtcaccaccaccctccaccaccaggtcccccatggcattctccagagagcagcaatttcccccaagcccagaatgttccagaatgttctggaatgttccagacgtcctcatttacagtcagaagccacctgcagcccctaagtggtggagcagggctctatgcagggcttgccagattttggagttcttgacctgagatcttcagaaaaccgactttcgcctctggcagctgtgtggccttgggtgagttcctcaacttctctgggcatcagccacctcctctacagagtggagccactgccggcaccttcttcaggaggctgaggtcatgctgatcctcccaccacccccgcagggtctctgcgtacccccctgcagggaggaatgtttggcctgggtccctggccctctgtgggcctcagtttcccctcctgtaatacttttaagaagcccacctctccctgcccatccacaaggccacacacacggtcacagccacttgcagacacagcttaagagtcccacatgtgtccccacacagcccacttcaccacacccaaggacacaggtccatgcagacacagccttgcgcagttacacagagacacacacagacttggagagcccagcacactcagaggggccgctgctccgtccaacactcaaagcctcactcccaggccacacattccgtctcacactcacaatcaccgccacctacgagcacccacatagagccacaggcaggcatcgagacacatctgcaggcactatcagagtcacgctgaggtcacagccacagtgatgcgttggtgacacccacccgctggcggtcacaccgagtgtcccccagccaagtgcacaccactgctgacggtcacacacataccctttgccctcctccttaggggaccctgcccttccctgacctgccctgcacaccttgggcaacacatccagctcccctggaccccgtaccctgggcagagagggtccctttatcccagccctgcccaccttcactcctggagagcgtgggccccactcctcagccctcagagcctgcatgtccactgtgcaaatggggagattgaggctcagagagcacctggaattcactaccaccttccaccaccaggttccccttggcattctccagagagcagcaatttcccccaaggccagaatgttccagaatgttctggaatattctggacatcctcatttacagtcagaaaccacctgcagcccctaagtcatggagcagggctctatgcagggcttgcctgactttggagttcttgacctgagaccttcagaaaaaagactttcacttctgggtgggtgccagagcccaccccagggagccagctgaaggagaggacccccgagggatctgaacgcctcccccaagaggcttgacctccagggtcatagaaagttctagaacagggttttctgcccctggacatttggaaccatcattgttggttgtaagggccccgactcgtgcattgtagggggtttggagtaaccctggcctctacccactaggtgacctcatcctcctcccctggttgtgacaactgaaaatgtctccagacattgccaagtgcccttggggacagaatcgccctgcgtgagaaccactgttctagagtgaggggggacacaggagctttccttgaagcattctcgcctgaaaatgttaacagcattatctgtttgcacccctcatgggtggttaacaacagcaataaaaccacaagcaaaccagcctgcaccatcgcccgggggcagggcctcaagggcacccgttctcagggcccagtgccctccagggtgaggcatcgcaacacatccacaggcactatcagagtcacgccgaggtcacacccatagtgatgcatttgtgacacccatccgctggcggtcaaaccgagtgtcccccagccatgtgcacaccactgctgatggtcacacacatacccttcgccctcctccttaggggaccctgcccttccctgacctgccctgcacaccttgggcaacacatccagctcccttgggccctgtgcctcccagcgggtgaggctcctagcaggtgacattcagtgtggcaaggtctctgggagcaggtcccagcaggtaaagtccccaacagccgagatcctcagtaggtgcagcctccagaaagcaaggtccccagtaggcaccatccccagccccagctggcaaggtccccagcaggggaggctcctggcagtgaagcccggcaagtgaaatcccaggtaagtcacatgcctggccaccaaagactccagcaggtgaggccccaggcaggtgagaccccaggcagccgaggccccaggcagccgaggccccaggtaggtaaatcccccgactagtgagaccctaggtaggtgaggccctgggaaagtgaggtcccggcagcccaggccccatgccggcctctcaggtgaaccaagccgctatgctgcgcaccgtctggtacctagattcctgctgcagcttccagcaggccttgcagaaagccagtgcccagctgaaggagcgaggccgcagcgtctcccgccagtgaaagtagctcaggtagcgggcgtggtccttgtccagctcctgcaggtaccgggccaggtccttggggctctggaagtcgtccacgtggatgaaggcgtcgggtggcaggaacctctcgtagttgcttctgctggggcccagcaccacgggcacggcccaggcctccagggcgttcctccacagcttctcggtgatgtagtcggggtgcaaggagttctcgaaggccagatagaacttgtaccgggacagcgtctccatcatggtccccttgggcaggggcttgtgggagcgtccgtacacgtccaccttgagatgagcctgcaggctctggtagtagcgcaccctggccgagtccggcttccagttggacaccgcccaggccaccagctcggtcttggccgagaggttgagcggtgggtgggcaggctggccggaccacggctccagccagccgtagggcgtgaagatgtcggagtcgctgcggtaggacatggtgagattgaagtatccgtccagggcttccaggtgccggcagttgctgggggactccatgctgaaccagatccagcgctgcccctgcggcctggtggggggcgggaggttggcactggggttgtacatgatatcccagtggtgcacgatgaccgcgtctgcctgtgggtacacactggagtcggcagtgatgttgcagtcggccgcgccgggcaccatctctgagcagcggggcagagccacgggtgtgttaaaaggccacgtccacagcaggatcagtagggtggggtgggcaggggtcgccatgctgtcctggcagcgggacccattgggagccccggtgacaggttccactgccataagccctggcctaggggatccagtggcatcgtctcgggacacacgcaggtaggagaagaaacacacagccaccagcagctgaaacagcagcccggccagacagcggcgccacagccactgtggcttggctgggcccaggggatccatgggtcagagtagctgggaagagaggagagaggagtgagggtcattaaggaagatcacccacttcctggccacgtgtcctgagagaagctgttataatttatgacacagcttgtcataaatgcccccagtacccctgagttgaggattgaatttataactctgacagggaagggtacgatgggattaggttttgcaggtaacataagagttctccagataaggtaggagttgagggaaagggtgtccgttggatgaggaaagagccagtgccaaagcctggcggggtgagacacctgagcagtttgcagacaaagaaaaggaagtgctcagggcttccagtttaggcttgattttctattcacttggtctttcaatcaacagacactcaaagttaacccctctggccctcagacacactgtccccgtcctgggggagaggctgaggctggggagaggtggggaggataggagggagaatgggcaggtgtgaagactcaggagaggcaggggctgaccaggcagggagtggggggatctggggccccagggaggagcaggctttcagggaagacatggaaccccgcttgttctggagacacccagcacggaactggagggagcccagggccctcagagtgtaggcactgggtctgggaagcctgagaagaaaaaccttcaaagaggctaagagggcgaccggaggaggaggagggaacccgaaccatgctttgtgatgggtgaggtgaggcttggatgccagggtggactgtttacagttttaaatgtacatctaaaaactgaacagcatatttaaaaaaaattttataggccaggcgtgagggctcatgcctgtaatcccagcattttgggaggccaaggcgggcagatcacctgaggtcaggagttcaagaccagcctggccaacatggcaagactctgtctctactaaaaaatacaaaaattagccggatgtggtggtggtgcctgtaatcccagctacttgggaggctgaggcaggaaaatcacttgaaatgagcggagatcacaccactgaacgccagcctgggtgacagaatgagactctgtctcaaataataacaataataaatttataacacagcatcttcctctgtcacccaggctggagtgcagtagcatgatctcagcttactgaagcctcaacctcccaggttcaaatgatcctcccacctcagcctccagaagagctgggattacaggcaagcgccaccatgcccagctaatttttttttttttagacggagtctccctctgtcgcccaggctagagtgcagtggcatgatctcggctcactgcaagctccacctcccgggttcatgccattctcctgcctcagcctcccaagtagctgggactacaggtgcccgctaccatgcccggctaatttttttttgtttttagtagagatggggtttcaccatgttagccaggatagtctccatctgacctcgtgatccgcctgcctgggcctcccaaagtgctgggattacaggtgtgagccaccatgcccagccttttttttttttttttttttttaaatttacttttgagacttggctcactgcaacctctgcctcccagattcaagtgattcttgtccctcagcctcctgagtagctgggatgacaggtgggtaccaccatgcccggctaatttttgtatttttagtagagacagggtttc[132 bp omitted]aacagtattgttttggtagaaaccatgtcaccattgctacccaaaatttagtgcctaaaaagagaggtgcttatggtgtcaaatttccatacgattgttatttcttagtatgaaagaaaggatgtgaagtagctcattaatgattttctacattaattacatattgaaataacgctttggatgtattgggtgaaataaaatatatcattaaaattaaattggccggatgtggtgcctcacgtctgtaataccagcaatattgggtggatcacctgaggtcaggagttcgaggccagcctggctaacatggcgaaaccctgtttctactaaaaatacaaaaaattagccaggtgctggcacatgcctataatcccagctactcgggaggctgaggcagaattgcttgaacccgggaggcgggggttgcagtgagctgagattgcgccactgcactccagcttggacaacaaaagctaaactccatctcaaaaaaaaaaaaaaaaaaaaagaaaaagaaaaacattaaatttcctggtattcttttttaatgtggttgctgggaagttttctttctttctttctttttaaaattattattattttttgagatggagtcaccgtgagccactgtgcctggcctattgctgggaaattgtaaattacattcggggtagaaaacagtttggtgcttccttgaaaagcctgagagatacttatcacatcaccagcaatctccctcctaggtagaagccccaaagaattaacaacaaaaggacgcaaacagatacttgtacacccatggtcacagcagcctgactcacaacagaacaaacagcccaaaggtagaaactacccagatgtccatcaatagaagaacaaatatacctagtgtgatccatccac[131 bp omitted]aacccagtctctatggaaaatacaaaaaaattagctgggcatggtggtgggcgccagtagtcccagctacttgggaagctgaggcaggagaatggtgtgaacccaggaggcggaactggcagtgggccgagattgtgccactgcactccagcctgggtgacagagtgaggctccgtctcaaaaaaaaagagaaaacctgtctctactaaagatataaaaaaaagagccggcatggtggcacatgcctgtaatcccagctacttgggaggctgaggcaggagaattgcttgaacccgggaggcagagcttatagtgaaccaagattgcgccactgcactccagcctgggcaacagggcaagactctgtctcaaaaaaaagaaaaggagcgaggctcccacacaggccacagcgtggatgaaggctgaggacatcacattcaatgacagaagccagacacaaaatgccacacagtgtgtgatcccatttctgggaaatgtccaggacgagccgatccacagagacaggaagtagaacagaggtgactggaggctggagaggggagaatgtttgtttaacgggtccagagtttctgtttggggtgatgaaagttttggaaagatgctggagtgatggttgcacaacactgcacgcgatgccactgaattgtatgcttaaaaatgcctaaatgcgccaggtgcggtggctcacgcctgtcatcccagcactttgggaggctgaggcgggaggatcacctgaggtcaggagttcgagacaagcctggccaacatggtgaaaccccgtctctactaaaaatataaaaattagctgggcatggtggtgcacacctgtaatcccagctactcaagaggctgaggcagaagactcacttcaacccaggaggcagaggctgcagtgagcaacaagagcaaaactctctctcataaaaaaaaaaaaaaagcctaaatggtgaagtttatgttatacatatatgtatggatatatggaattacaatttaaaaataaggtggctgggcgcggtggctcacacctgtaatcccagcactttgggaggccaaggcgggcggatcaccaggtcaggagattgagaccatcctgactaacatggtgaaaccccacctctactaaaaatacaaaaagaaattagccaggcgtggtggcgggcgcctgtagtcccagctacttgagaggctgaggcaggagaatggtgtgaacccgggaggcggagcttgcagtgagctgagatagcaccactgcactccagcctgggcgacagagtgagactccgtctcaaaaaaaaaaaaaggtaacacaccaaaaaccattgacttatttacttgtacaccttaagttggctcactgtatggtatgtgaattacatcctgatgaaaccgtttatttatttttgagactgagtcttgctctgttgcccaggctggagtgcagtggcacaatctcagttcactgcaacctccacctctgcgttcaagtgattctcctgcctt[135 bp omitted]ggcctcccaaagtgctgggattacaggcataagccaccacgcccagccgatgaagctgttttaaaatgatgtagggttgccagctttctctgttgggccaagttggtcttaaccttgcagcaggtgacctgggtgtgatgaagtgatccagacacccagtcccaagctcatgccaaggttctggaaagagattcaaaacacaagccctcagggcacagtccgagcccagagtgggagggaggttgaactttgaccaattactgctttgtaccattggactctagagcctcaggcacaggttaatttttatttttaagacggagtctcgctctgttgcccaggctggagtgcagtggcactatcttggctcactgcaagctccgcctcctgggttcacgccattctcctgcctcagcctcccgagtagctgggactacagggcccggctaattttttgtattttagtagagacgggatttcaccgtgttagccaggatgctcttgatctcctgacctcatgatccgcccgcctcggcctcccaaagtgctaggattacaggtgtgagccactgcgcccagccaggcacaggttaatttttataaagtaattgatattaagatggaattacatgggccctgggttcatggcagcccctcttaggagacagtgaagtatattttaacgaggtatagaagggtagattggggccaggtgtggtgggtcacacctgtaatcctagcactttgggaggccaaggacagagaattgcttgaacttgggaggtggaggttgcagtgagctgagatcacaccactgcacaggagcctgggcaacagagcgagacgacatctcaattttaaaaaaaaaaaaaaaaaaaaaaaaaaaaagaagggtagattggggaaaatgggtaattcaggggtggtcagggctgaggtcccacccaagttgaacccaagatatttttttctagaaaaagaatgcctgggctggacacagtggctcatgcctgtaatcccagcactttgggaggctgaggcgggtggaccacctgaggtcaggagttcaagaccagcctggccaacatggtgaaaccccgtctttactaaaaataaaaaaaaaaattagccaggcatggtggtgggcacctgtaatcccagctactcaggaagctgaggccagagaattgcttgaatcagggaggtggaggttgcagtgagccaagatggcgccactgtactccaacctgggtgacagagtgagactccgtcccccccaaaaaaagcatgcccagttcctcctggtttggcgaatcagccagaaccttccatcccctcctccatcccactacatgcagcacccagaaagacccctgcctgcgactagggcctgctggccaaattccaggccactgcacagcctgcagacccttctccggggattctgtgcccatccagctgcatcctgaatcacagcagacaggaccggcgctgaggtgggaacaaacggagccaggacgcctttcctacgaggtctcccgtgatttctgggttggggataaaggtgccccaagactctctccctggatggcgggggcagcatgcccaggatgagagcacctcccaggaggctgaggacagagtaccagctggattctcaggacgtggaagaggccagaccaggtagcagcaggaaggaggaagtatacctggagctgaagccaggctctgtccaaccactgcacctgccatcaggtgacccagtgtgtcctgtcctggagctgggacatcctctgaaagcaaattgtgtgtctcctctaatccctgctgtagaattggaaagggtgcagggatttggaggcctaggtcatgaccctggtcctaccggtggcctcaatgcaatgcggctttgagcacaaagggaaaaggctgacctgaaccactggttcccaaagtgggttccatagggacaccaggggttccttgggaggtgggaatggggaagtgagcagaatttccaccttcccgccttccttcccaccagatcccacctccc[132 bp omitted]gaaaccccatgtctactaaaaaaaaaaaaaaaaaaattagccgggcatggtggtgcatgcctgtaatcccaggtactcaggaggctgaggcatgagaatcacttgaacccaggaggcaaaggctgcagtgagctgagatcaagccactgcactccagcctgggcaacagagcaagactctgtctcacaaaaaaaacacagaaccacaaatatttcctaagcacttactaagtgccaggccaagcactcctgcaaggagctggagggtgagtcaccgacaatacgcgagccttataagggaactaacaattaaaactgtggccttctaaacaaaacggggagggaaaagcattctgggtagagggaacaacctatgcaaaggccccgagggagcagaggtccaggcacgttggaggaactggggggagtctcagcaggctgggtcttcaccatgggagaagaggcagagctgtcgcagaggccaggccacggtcagccatggggtgttcagcaccagggcaatagggagccattggaggcttcaagcagaggggttaccatgttgatgtgtggtttgagatgctctcttttcttttttgagatagccttgctctgttgcccaggctggagtgcaggttggcgtgcagtggcatgatcttggctcactgtagcctctgcctcctgggttcaagagattcacctgtctcagcctcaggagcagggattacaagtacccgccaccatgcccacctaatttttgtatttttactagagatggggattcaccatgttggccaggctggtctcgaactcctgacctcaagtgatcagcccacctcagcctcccaaagtgctgggattacaggcgggagcccccacacccgtcctgagatgctctcttctgacacactaggcacaggccccactctggtggcctcaccaagcccttctgtgtgcctcaaagccactccctttccccgcccactcctgcagggcagtgtagaagtccaaggagccaggtaagtttcctggaatgcagaagagaaaggatgtggaaggatgtctttgacagaggatgtccttaaactctgtcactcccaagctgggtacagaggtgacagagcccacatttcaccttcaggtatcacgacttccctgttctagaaataatttccaggaggccgtttcatgctgccccagactttcaccgtctcagttcccagccaggcccaggccagtggggaggatcgactggccagggctgggccagggactgcggtctcccaggcaagccatttccagaagggatgacctgagtctgttctctgttcatgtcctcgctgggggcattgtctgtgactgattaaaacataactcatagaagttgggtatagtggctcacactcataattccagcactttgggaggccgaggtgagcagatcacctgaggtcaggagtttgagaccagcctggccaacatggtgaaacctcgtctctgctaaaaatacaaaaattagccgggtgtggtggtgcacacctgtaatcccagctactctggaagctgaggcgggagaatcacttgaacccgggaggcagaggtttgcagtgagctaagattgggtcactgcactccagcctgggtgacagagtgagactccatcacaaaaagaaaaaaacccaaaaaaacataactcatggggctctcagtcttggtgtgactttgtcctggagccccagccaagcctggaccggcaacgcttccatcccacacagctgtcctgtggatgtgaagacaggtcctgagagagggcgctcactactcaagtcactgggagtctcaatcgcaccaggctgtcttcagttggacagctgtactctctgccccctgcctcctgcttaattcccagtcatccttcagggctcggtgaaaacagctcctccagggagcctccccagataggggctctcttgccctcccagccagatcatcctttctactggctcctccaaccacccgtgcccctgattctaggctcaggccgcgaggatctcttccctctggctcagatgagctgagacttgcttggggggtgcggtgaggccatctgtgcccctcgttggggtcctggtcttcattggacaccccagctcctccctcagcctgggctgggtgggtgataaagctgtcagcctgctggaaatttctctccccttggggcctaagggctgggagccaagggcagctgccgctcaggaggagggagaaggccccataggctgggctgggtgcaccatgaaccacatgtgagatctggggcacatggggagacaatggggggttgagggcagtgctggtgttccagagggggcaggccagggtcccccaatgttggccaggtggctggtcttctgcccttgtggaacccaaggagggtttccatgtccctctaagcctcagaggaaattccagagggagagaaagagaagttgggaaagggagctgttcactctgacatcagctcagggagaggcggagaccacgggggctccaggggcatcaggggacagagcagcctgtccccacacctcttaccccctggggactgggcctgccccagcctgttaggaagccctggcctggcctgccgagggccccatccccctcccaggacccctggcttgcagccaggtggtggggagaggggcccaggtgggtggtgtgtgtggcaggtgagtgatgggcccagcaaggctggctcaggcccggagtcaccagggggcttagcagagactcttcaggccccccacaccttccccaccctatgcccctccacccttctacctgggcctgggggagccatcacaggcacctctgcatgtccactgtacagatggggaaaccgaggcttagatagcacctgggagtcaccaccaccctgcaccaccaggtcccccatggcattctccagagagcagcaatttcccccaacactagaatgttccagatatcctcacttacagtcagaagccacctgcagcccctaagtggtggagcagggctctatgggggacttgcctgactttggagttcttgaccctgagatcttcagaaaaccgactttcacctctggcagctgtgtggccttggatgagttcctcaacttctctgggcgtcagccacctcctctgtagagtggagccactgccggcaccttcttcaggaggttgaggtgacctggaaggtcacgctgatcctcccaccgccccacagggtctctgcgtaccccctctacaggctggaatgtttggcctgggtccctggccctctgcgggcctcggtttcccctcctgtaatacttgtaagaactcagcctctccctgctcatctacatggtgctggggccactaaacagacagggagtgcgggaagccccaggtgacggtgacagaaacctggcaccccctagaaacctgaccctggcctcacccccgggtcccctggcaccaacacgctgaggtctgcccacccctggtacccaggcccagctgggttcatgcagcttaaatttcagcctgtggtgggtgaagaggcgggggctggacacgcttcattttccaatttctagaaataaaagctgtggggccatctattgtggagtggaaataaagcccattgcaaaaccttgtgtgtgaaaaaataacaatagcatttacctccctgcccggggagagaaaattccagggaatacatggggccggggaacaaagaggcctttctctcattctggaaaggttttgtgaagtgtgcgagtggcaattttagaatcagaaaagctaatggaggtattttctttctttctttctttctgagactgagtcttgctccatcgcccaggctggagtgctgtggtgcgatctcgactcactgcaacctcccactaccgagttcaagcaattctcatgcctcagcctcccgagtagctgggattacagatgcccgccaccacgcccagctaaattttgtattttaagtagagatggtgtttcactatgttggccaggctgttctcgaactccggacctcaagtgatctgcccgcctcggcatcccaaagtgctgagattacaggcgtgagccaccacacccggcccaatgaaggtatttccgagaacgaaaacggttaggaggtggtctgttggaacctggaggtgaaaagtataattttctttcctttttttttttttttccagacggagtctccctctgtcgcctgcccaggctggagtgcagtggcacaatctcagcccactgcaacctccgcctcctgggttcaagtgattctcctgtctcagcctcccgagtagctggaattacaggcacgcgccacgacgcctagctaattttttgtatttttagtagagatggggtttcaccgtgttagccaggatggtctcaatctcctgacctcgtgatcagtctgtcttggcctcccaaagtgctaggattacagcagtgagccaccgcaccgggccaaaaagcataattttcttggtttgttttcaggcgatgttttcaaggtttctaagcacctgtctctccatcggcaaaaattacagccagtagagccagcgacctgggcacctgggccagccctgcagggagtgtatggagatgccactcaccttgggaagatgcaccaggagttacggtccactctgtccctgttggcgttctctgaagagtagaaattttcccctacccagactctgagaatgttccaaagacctcaatttatatttggtatccacctgcagccactcagtccctcagcccagctgtagcctctggtcactccccctcccagagggagacagtgttgagatttgacttcagaacaagggcagagccttacaaaaaatgagctgggcatggtggtgggtgcctgtaatcccagctactcatgaggatgaggcaggagaatcacctgaacccaggaggtggaggttggaggtggaggttgcagtaagatgagatcacgccactgctctccagtctgggcgacggagcaaaactctgtctcactca[134 bp omitted]cagtgaaaccctgtctctactcaaaatagaaaaattagctgggcgggatggtgagcgcctgtaatcccagctacttgggaggctgaggctcaagaattgcacgaacctgggaggcggaggttgcagtgagctgagatcgcgccactgcactacagcctgggcaagagactccgtctcaaaaaaaaaaaaaaaaaaaaaattggtgaggcgcggtggctcaggcctataatcccagcactttgggaggtcaaggtggggggacttcctgaagttgggagtttgagaccagttgaggtctttggaacattctgagactccgggtagggaaaaatttctatcctccagggtactccaacagggagggagaggactgcaaattctggcgcatctcttcccaaggtggcgtctccatacactccccgcaacatggagaaaccctctctctactaaaaatacaaaattagccgggcgtggtggtgcacgcctgtaatcccagctactcaggagactgaggcaggagaatcacttgaacccgggaggtggaggttgtggtgagccgagattgtgccattgcactccagcctgggcaacaagagtgaaattccgtctcaaaaaaaaaaaagatcttgtttatttcttggtttgtcagtgtcttccccagattgggcggctcatggggcagggcttgggtccccagtatgacctggcacccagtaggcactcagtaaacaggtgctgaataaatgtccttgtctgtgatggaagcttgaactcccacttggagaattataaacgaagactgaagatctttggactctggggcaggagtgaccctccccctgccccttccccaccccccaccgaccaccccagagattacagcctgcctcaggggaatctgcaggtgaggtagtcctcacccccagtgacacagggcaggacctcgcagggctggagatggaggaggccgggtggcaggcacaggcaggcaaagaatgctgccgcagacgagaatgaataaacaggctccttggatgtcagaggctgggggtggggggacactttgaacctcacgcctggctggggatgtttggacaaggcaggcggccagcgggtgtcatcagggctaaaattaacctccacttcccgctcagcccctccccctgggccaggagggaggctggggccccggccatcacttaagtgagcgctgtatgccggacaaagctccttgaagaaatcaatgcacgtggtcctctcaacaaccccgacagctgctatcagtaatggcattgtgatttatccccattttgcaggtgaggaaaccaaggcaccgagaaaaagggaggctgatagccacaaaactcaaaagcagcagagtcaggactcgaacctgggattcagggagtgtgttctcacctggaggtctccctgaaagccaggggagatgaaagagaccctgagcgatgagtccttggcggaggcgggcatgcggcccctcattcactctcccctagggacctctccagaggtttccagagttacagtaactttgggtctttttgtgcaaattccaagagatgcctgctgtgccagtgacctgctggggacctaaaacaccctcattgagccagggaagggtcaaggagggggcggggacagggctggtgggctgtggaaacctcgtgcagatggtgagatattaaaatacatccactccacaaaaattagctgggcgtggtgacgtgcatctgtaatcccagctactcaggaggctgaggtagaag[146 bp omitted]catgcctataatcccagcactttgggaggctgaggcatgagaatcgcttgaacctgggaggtggaggttgcagtgagccaggatcgcgccaccggactccagcatgggcaacagaacaaaactccatctcaaaaaaaaaaaaaaaaaaaaggaatgaatgatgctgtaagtatatcccaagaattgcatgggatatacttacgccaagccgtgattcatgatctatctgaaatccaaacttaactggatgtcttggatttttatttgctaactctgatgacttcagctgggtgggggtggggggcagtccctgtagcgggcaggtgctaagagcaaaggcaggcattaaggaggtgaaatcagagccacaccaggcgctcaggtggcttccaggacgcgacgccttcctaatgggcttcccaggtgcctccgggaccagccagatggaggaggcttcggggcctccctggccctcacccgctgggccagcccctcatcaccacctcccaggtccctcctgccaggctcattattcatctttaacggtcactcggcagggggagtgtgggctgggaacacctgggactcccaggcttgcagtgggcggcctcactaatgggggtgaggcccccattagagaggcagtaatgggtgggaaaggggtcccggcccaccaaggagctggcctggggcaggaagcatccaatttggggcaggggcgggaaacagacttctgccacccccaccctgccatttcctttcctgtcgaggcaggagtccagggaagcacctctggatgccttcacccttcccaatctccacctggacggggtcctgctgggccccccagacgcagagggggctgctctggcactcctgcctccccatatccaggcaggggtaggatggatgccccagccttgaccttccagcttcccatctgccagacttgctcaagagagtggctcacggctaaggagtggaaactgacacccagagaaggatctagaacctcgtactcttccatgctcttagccactcccctttctgtctctcctctgagctatcacacatgttgttcctctctcttgggcactctagcctggatgacaaagggggatcctgtctcttaaaaaacaaacaaacagacaaggctgggtgcggtgactaacatctgtaatcccagcactttgggaggccaaggcgggcagatcacgaggtcaagagatcgagaccatcctggccaaactggaaaaaccccatctctactaaaaatacaaaaattaactgggtgtgatggcacacacctgtagtcccagctactcaggaggtggaggttgcagtgagccgagatcacgccattgcactccggcctggtcaacagagtgagattctgcctca[132 bp omitted]caacatggagaaacaccatctctactaaaaaatacaaaattagccaggcatggtggcgcatgcctgtaatcccagctactcacgagtctgaggcaggagaatcgcttgaacccaggaggcagaggttgcggtgagctgagatcgcaccattgcactccagcctgggcgacaagaatgaaactctgtctcaaaaaagaaaaaaaaaaaaagaaaaaaaatgtccctacacccctattagaatggccaaatccaaagccctgccaacagcaaccccaaatgccccgaacccctgaggacagggagcaacagggagtgtcattcattgccggtgagaatgcagaatggtacagccgctttggaacagtttggcagtttcttataaaactaaacatactcttaggatgagacctagaaatggtactcctaggtatttacccaaaggagctgaaaacctaacatccacacaaaaacctgcacacagatgtttacagcagcattattcacagttgccaagattgggaagcagccaagatgtccttcagcaggagaatgggtaagaacactgtggtgtgctcagatgacaaaattttattcaggctgggcacggtggctcacggctgtaatcctagcactttgggaggcaggggcgggcagattacctaaggtcaggagttcgagaccagcctggtcaacatggggaaaccctgtctctactaaaaatacaaaaattagctgggcgtggcggcacgaacctgtagtcccagctattcaggaggcaggagaatctcttgaacccaagcagacattgcagtgagctgagatcgcgccactgcactccagcctgggtgaaagaggaagactccatctatatctatatctatatatctatatctatatctatataaaatataaaattcagtgctaaaaagaaatgagctgtcaagccatgaaaagacacagaggaaccttaaatgcattttttttttgagacggagtttcgctcttgttgcccaggctggagtgcagtggcacaatcttggctcactgcaaactctcccccactccctgggttcaagcgattctcctgcctcaacctcctgagtagctgagataacaggcgctggccaccacacctggctaatttttgtatatttagtagagatggggttttatcatcttggccaggctggtctcaaactcctgacttcaggcctccctccgcctgccaaggtgctgggattacaggcgtgagccaacacgcccagcccttcaatgcatattactgagtgaaagaagcccatttgaaaaggtgacacactgtatgattctagctacagaatattcccgaaagaggaaaactatggagacggtgaaaaggtcagtggctgtcaggggctgggggaggaagggacgaacaggcagagcacagtggatttttagggtagtgaaactactctgcatgatactgttaaatggtagacatatgtcattacacattcatccaaacccacagaacatatgcatacaacaccaagagtgaaccctcatgtcaactatgaactttttttttttttttagatggagttttgctctgtcgcccaggctggagtgcaatggcctgatctcagctcactgcaacctccacctcccaggttcaagtgattcttctgtttcagcctcccaagtagctgggattacaggcatgcgccaccatgcccggctaattttttgtatttttagtagagatggggtttcaccac[306 bp omitted]aggcaggacgatggtgtgaacagggaaggcggagcttgcagtgagccaagattgtgccactgcactccagcctgggtgacagagtgagactccgtctcaaaaaaaaaaaaaaaaatttcttcattgctgcccggtgtatagtagcagaagactggaggccaggacatgtgctttcaccagaacaatggtccagcctcaagatggaatattacactgtccttacaaaagagggggaagttctgcactcgaagaaaagatccgagatgcattgttaggagtcaactacgctgagctgcaagaaagtacggggagtgtgatgttgtttccgtggggaaaagaaaatatacagacatgcttgttttggcgtggaacatggctggaaggagaaacaagaaaccgactaatggcctctggggatggcgtggggcttggggagtggctggtatttattctaaacaccctctagaatcttttgaattctatggcatgcgtctgtcttacctctaaaagaaggaggataaactgt[213 bp omitted]aag[139 bp omitted]gactttggatgggtttgaaaaggctggggtggcaggggtggtggctctagatttcaggccaggccatcgctctgcctgctgcccctcagtttgggctgaatcccccaccaggccccccaacgaggccccccagagccctgctcttgtcctggctcacacctttcctactctggttcagcgagggttcagaccagtggggacccctggaaggtgagatgtgggctgggctggggccagggacagggccaggcctgccggagccccttgcagctcggcccgaccacccagctttccaggaagcccgaggggaggcttggctggctcagaggaaggacctgtgtgcgccaatggtggggctgggggccaaaccaggcccctctgagcgcccacgctctgaggaggaccacagcaagtggagggaggctggctagaaaagagatacacagggaggaaggcccgagcttccctatgcctcagtttccccataggccaaatggctcgctggctgtgtggcccttgtggacacaggggatgcctgagatgatgtgggaccagggaactatggctccactgggtcctagccttggacgccaagccagataggataagggggggcaagtcccgccctgacttctggagccctgaagtaatgactaacccggctttaggctttaaggctggggcctcctaccagaacacagccaggagagagtcacgtcctctttcctaagatctctacccctgtctactccctcttcctccctctgtgctctgctggggaccctgtgggtacagggatgtggcacccccaaggcattcagggctctgggcctctctttttttagagacagggtctcgctctgtcacccaggctggagtgcggtggcaggatcatagcttactgcagcctcgaactcctgggctcaagcgattctcctaccttagcctcctaagtagctgggactacaggtgtgtaccaccatgcctggctccagccccctttttggctcttttgggggtaccctagtgggccagtgttggtcccaggggtctttgtcaggacaagggaaatgtttggcccagaagtgcctgtctatggtttaagcaagatctgcagctggccacagtgactcccgcctgtaatcccagcactttgggaggctgaagcaggagggtcacttgaggccgggagttcaagaccagcctggacaacacagtgagactccatctctacaaaaaatttagaaattagccaggtgtgttggtgcatgcctgtagtcccagcttcttggaagctgaggcagaagaatcgtttgagcccaggagtttgaggttgcagtaagctatgatctcaccactgcactccaatctgggcaacagggcaagaccttgtcttcttcttattttttgagatggagttttgctcttgtcactcaggctggagtgcagtggctcgatctcagctcactgcaacctccacctcctgggttcaagtgtttctcctgccttagtctcctgagtagctggtattacaggctcacaccacgatgcctagctgattttcatttatttatttatttattttgtttatttttttttggagatggagtcttgctctatcactcaggctggagtgcagtgacgcaatctcggctcactgcaacctccgcctctcaggttcaagcgattctcatgtctcagcctcccaagtagctgggattacaggcacctgccaccacgcctaatttttgcatttttagtagagaccgggttttgccatgttggccaggctggtctcgaactcctggcctcaagtgatctgccaatctcagcctcccaaagtgctgagattacaggtgtcagccactgcgcctggctaagaccctgtctttctttttctttctcttttttttttgagatggagtctcactctgtggcccaggctggagcgcagtggcgcgatctcggctcactgcaagctccgcctcccaggttcacgccattctctcgcctcagcctcccgagcagctggaactacaggcgcccgccaccacaccc[137 bp omitted]cccggccaagaccctttcttaaaaaaaaaaaaaaaaaatacacacacacacacacagtagttgcttcatgatgggtgtatgtttggagaaattcgtcattagatgattttgtcatgcacaaacatcccagcgtacacacgcctagatggtagaacgtactgcacaccaggcttcatggtactgtctactgctcccaggctataaacctgcagagcatgtgactgtacagaatactgtgggcaactgtaacatgatgacaaatatttgtctctaaacatccacaaacagaaaaggtacaataaaaatatggtataaaatcttatgggagccgggtgcggtggctcacacttgtattcccagcactttgggaggccgaggcgggcagatcacttaaggtcaggagtttgagaccagcctggccaacttgatgaaaccccatctctactacaaatacaaaagaattaggcggatgtggtggcgggagcctgtaatcccagctactcgggaggctgaggcagagaattgcttgaacccaggaggtggaggttgcagtgagccgagatctccccactgcactccaacctgagtgacagagtgaa[136 bp omitted]ccggtctctactaaaaatacaaaaaaattagccgggcgtggcagtgggcgcctgtagtcccagctactcaggaggctgaggcaggagaatggcgtcaacctgggaggcggagcttgcagtgagccactgcactccagcctgggtgacaatgtgagagagcaagactctgtctcaaaaaaccaaactaaacaaaaaaaaagaaaagaaaaaaaaagaaacaaaaacaaaaacaaaaaacaacaaattaactgagtgtggtggtgggcacctgtaatcccagatactcgggaggctgaggctggagaatcgcttgaacccctaggcggcagagactcagtgtcaaaaaaaaaaaaaaaaaaaaagtctcatgggactcccttcacatatgtggtccgtcagtgaccgaaatgctgttatactgcacatgactgtttgctgaatgaactctgagtcttgcccccgggtctggagggcttctcttcccgtgccttcccgcactccactgcagccatcatctcatgtggggagagtgagaaggaccctgatccccctccgagagcctataccacccaggcagcaaagcagggccaggcagggtgcacagccacccccaagtggttctcaggccccacctctggacctcctaccctttgcagacctggagattcattcatttgtttatccattcattcattccacacatagttctggagccctgctgcgttcctcggctgggtgccggggtgtaggcagaggatataacagccaggatacgtcccagtcctcaaggaggtgcacataaataacacacgtgatggtgacgtgggacttagaaactggcaggggctacgggcaaaactagaaggcaaatgagtgtggagtgctggtggcctggggacgggggatgaggaggtggcttgtgagctgagaattgaaggaggtgaggggtgagcttggggacatctaggggacaggcattgcaggcagagggtatggactatgcaaaggccctagggcaggactgtgccaggggttttggaggaagagtgaggaggctggtggggctggagcagtgaagaggggaggggaggagagggaggggagggagaggaggggtcgggacacacagggcatagtgggctgtagagaggatttgggcttttcccccaagtggggtgggagccatggaggactgtgggcaggggaggggcgggacctgacttaggggctcacaggcgccttctggctcagggggtagccgggtgaccagggcagaggggactacgcttgtcgtgatgatggaatcagactagaggcagatctgggacagattctgaaggcaaaggggctcgagatgcggggagggcgggagcagctcttcagtcccaggaggggcacacatcagccccgtggggtcttctcagctgtgtcccaccccaatcatgtcaaacacatttataggagcccacagcccacactcaacacaagtttaaaggagtacagttgtgctcaagttggcagcgaaaacaccttcctttctcagtgaggtattttctttttttttttttttgagacggagtctcactctgtcgcccaagctggagtgcagtggcgtgatcttggctcactgcaagctccgcctcccgggttcacgccattctcgtgcctcagcctcccgagtagctgggactacagacgcccgccaccatgccagactgtttttgtattcttagtagagacagg[148 bp omitted]aagtcttaaaggaacaaattgccattttccaaacaatagctattcttaggagaagtaacacttcttttagctactgccaggccctgggaagtcacctcccgggcctcagtttcctcatctgtaaaataggactaatgcctaacagagctcacgcacggctgcgcagactaaaatgagccaaaaataataataacaactgcacctgcctggcaggtgggaaaagcttgatgttccccacccccaccccccttttttttgtcttgtgaatgttttcttggctcacccaagagcttagagacccccggcggcggggcctgggtcagcgccagcccaggccagcgttatttatttatttatttttgatacaaagtctcgctcactgtctcccaggctggagtacagtgacatgatctcggctcactgcaacctccacctcccaggttcaagggattctcatgcctcagcctcccaagtagctgggattacaggtgcctgccaccacacctggcttatttttgtatagtagagacagggtttcactgtgttggccagggtggtctgaaactcctgacctcaagtgatcccccagcctcggcctcccaaagtactgggattacaggcctgagccacggcgcagggccaggccggtgttcttggagccttgtctctgctggggatgtgtctccagggatggattctcgggaagcaagtgtgtgccctgcagcccccaggcacctctcctggaccaggaggcccctgatcgcccactgctctccctcacagcaggcctctgctgttgctgtgtgctctgcctggaccagcctcccgctgggtacacatggaaaagcctcttcatccttgggccctctctgctgtgccgcctcctcctctaggaagccctcctagctccccagggaggctctgcccctcctcagttccagccctgactgcctggggctgggaagggctccatgaagttcaaggtaaactcaggaagggtcccccacagcccctcagggagcctgctgggaccgatgttccagacgggggccctcttgtgtgtggggtgggagtgacgtcagccctccacaacctagtaaatgtttatgggccggggggcctcggctttggggttccctggagcccagcaagagaccaccccctcgtgttccattctggggggcccgtcctgcaggcgaggtgggggcgcctggcaggcctgcgccaaccctggcggctagcccggaatgggctgggtgggcggcgagcacagctcctggtctgagccgtcggctcccttgaacacagggaggcacctggggctgggaggtgcgaaggggcgtgcggcctttaaatttcaagctccactacccagggtgggcctcagcgcgcgcatccgtggaagagggctaagagatctggtacagggtttgggccgcacacgggcctggagggccggggaagggcttgcagggggcggaggcctgcgtggaaccagtcccagaagcggccatggtgcagggctgagggtgaccgtcgtggggacgtggactagtctttcctcctgtccagccttcggtgtccttggctggaggtttggggctgtattgcccattcctagaagccatcacttcccggctgcggtgggcaggatgcatgggaaggaagggggatgagggacagacaaggcctggagtgcggaggaagggatggaatctgacgcctgtggtcaccgcggggctgggggcctggggatgaccgcccgggtccacactgcccagcaggccgtgctgtggtgggcgctgccccctgccggccgcagtagagacagaggccggtgccctcgagtggatgcgatgcccgtgagtggatgggatgcctgcagggaggtggaatcgtctttctttgtggggcatctctgaggggcccttattcccatttaccaggtgggaaagctgaggcctgggtgctgccgtcctctgaggacagaacaaggaaagaatcaagttctggggttcgaacccagagtgtttaacaatgactctattagggcttggacaggtgtcagggcccctgcccctctgggtgcggggtgggtgtgtccgccctttctcagggagcccgaggcccgggcacccagctccggaagtggacgtgaccctgagctgttgcatgccccccttgtgctggaacacgcgtggacatctgtgctctctccagagaggacttcgaggcaggcgctggaagaagggacccagaatctctgtacacagtggctcatgcctataatcccagcactctgggaggctgaggtgtgaggactgctcgaggccaggagtttgagaccagcctgcacaacacagtgagatcctgtctctacaaaaaataaaaataaaaacaattagctggctgtagtggtgcacacctgcagtcccagctaccagggaggctgagatgagagagtcgcataagccaggaaggtcaaggttccagtgagccatgatcctgccactgccctccagcttgagagacagagcaagactatgtctcaaaaagacgaatttttggtagagacagggtctcactgcgttgcccaggctggttccaagctcctggcctcaagcaatcctcccacctcaacctccaaaagtgctgagattacaggctcaaaccaccaggcccagcctacaacattttttaaaaaaattaaccaggcatagtggcggtggccatagtcctggctactcgggaggctgaggtgggaggattgcttgggcccgggagttccaggctgagttactactcgggggtggacagagaaggatatgaggctgaaagtgaagtttggcttttcacatctaggccccgcggatgggcttgagaaaagggaagagatggggccggatacgggtcaggagggccatagccagccctgccggttcctgctgtccccggcccaccagcagggcccagatccatcccagccagggctgtgcacagctccgctcccctgggtggagcctggagcgccctaatttgcagcccaccgcagcatgtgggagcttgcaggcttcctctccagctgccagggagcatgagccagttctggagaaggggcccggggtggtgccagcattccagggccacctaaatcactggcctgacaggtggcaggaagggatcgcaattctttcccttgtcgctgccaccagccaggtgctgaggggggtcctgtcccgctctgccctagccccaggggctgcgagtgacctgccggatggggacggctgctggaccagcctgtccggggctctccgctccagtgcccaggaatttggagacagggcctgggcgtgttttccacatgttgttggctttggggacaggcccagagaaaggatggctcaagatctgcaggggggttgtgaccagagcccacagcgctgagggaagggctgtgggcggcagggcccattttccacttgctggcaggtcactggcacgctcctgccctgccctgggaactgggggaagcagaggctggggcgcatcccagccgtctcccctcctgggctcccgatggccccagcctgatgcactaccagttctgtggggccaggctggtacccttggcagggacggcaggcggcaggcaggcgcgtgtgcagggggccttatcttatctcccttcctcactccctcccagatccgccctcaccggctgctgtgtcgccgtcatcaagccctccggacactgacacacacacagacacagaatttatttctggacgcattctgcaggctggaggtcccggcaggcacagggctcacaccttgggttttgcaaacacctcccagccctccagccggcccatcttgaccagggaggccgctatgccaaagtacacgcaggcggcggcgccaatcccgtagttgtgcgctgtgggagtggggaggtgatgtcaggcccgggtggggctcggccggaccaagacgctccacgccctggccggtgcccaccctgggagccagactgagacccctgacaggacactctcttcagggattaagtcactcaggaagagggccctagactctggagatgtggaaactgatgcacagagggaggccggagtccaggttgcttcccagcaggaacccaggctgtgggtcctcatcccgccccacactgacttccccctgcgaggacaccgtgctgcccccagctggggctggggcaaggctgggcaccgggccatggtgacacatcggtgtgtctcagtctctcctttgcccatggatgccagggccaggccacgcatctgtcccgtggtctgtgtaccgaggagccccgacagtgcccccacttctccaggctctcctgctccgaagcctccgggccagaggaggaaggaggtgtgtccccacacaccaggacctaaagggactcacactctttgaagagagacagggaggctggcttggggacagggagcagttccagcctgagctgggctacagtcaagacctcaacccacctgcaacctctgaccagttccagtgggagctggggagggacaaggcctccccaaggtcttgacgcagagacagcagtgacggcgtacgccctgccctcgcaccctccctctctgcctgcctggaacctgccattcatcactcccaacatgccaggccagagcggctgagctgcaagagggctcgttcactcctcccgctggccctgagggcccgagccttggcgggctgggggtaggccaggggcacaggcgggcactgacgctgagcccgggcccatgggagggcaggagtgatgtctggctcatgctccagacgggctcccctgtgccaagcgtggccttctccaccagggctgcaccctctgatggctgcaaagaaggccacttgctcctccaggtgacctcgggccacttaattccctccctgagccctaatacccttttctgtaaagtgaaggttgcgggggcagctcccctgcagggctccaggtgcagggagagagatggcagggcgagactccatccatcctcctctctgactcacaggccagtggcagagacagggggtgaccttggtgacctgtgtcctctgacaaggcacacagaaggaaggcggcacagagcgagggcggcggggatgctggcttgtacacagggtggtcaggacagtgaggggaacagcattccacgcagtgcactgcccatgcaaaggccctggggcaggactgtacctggcatgtgggaggagcagtgaggaggcccgtgtggctggagcagagtgaggaggggagggtggggaggggacagggcaggtcagggagggccacagtaggtgcttaagcagcagcagcagctgtcgctatgactgaaatggctggtgttcaagaaggctgctttacttcttgtccgggatggaacagagagggtggaggatgagcagaggtcaggggtcattctgccaggctgggaggagggtgggggtggggagggggccactcactgcgtgctcccagagtcaggcctccggcgcagccaccgaggaagtagttcagggggtcgtcgggcttctcgcggacatgggcgctgatgcaggtggtgaggccaaacacggccccgacagcagctgcggggtagacgggaagagcaagggcctcgagacgggcacagcaggagcctcttgggcgctcactgccagtgtctggatggagagagatgccacgagtcggctgctcgctgtgcatggcagcctcctggccccagtcctggagctgttctcctgggcctccccaccctacatgtattcctgataaaggaacaccccactttctccggatggccagcactgtggacacgggctggggagtcagagagaagaggcagccgtcaaatgtgctctgagagctggggctgtgccaggagagggcccagccatgcccagcccagcgtgctcacctgcagtgaacgtgtattgtccaaccttagccactccttcaaggaaggtgcccggaggattgagtgtgactctgtaggcagcggcggtcaggcctgcgagacagaggagggaggctgttcagaccccactgctgctaagcccttgcttggccgggcaccccactgggtggtctccctccctcagtcctcacgatgccccccttctttgcccatagtgtccccggctgctgagtggcagagctggatttgaactcgggtttgctgctccaaaactggggggcctctcacttccttccccactccccgccaggccttccttggccactttctcaagcctgaccagtactggctcctgcagagcacctgctgggcgcccatcagccatgctggccctggcagggcaccggccggcagacggagactcatccacgtggtggacacaagaacaggcctgagacctcagttctgcggctgcttccagcctcacaccgccagctcagcggcgccccccacgggccctggcaccagggccccagctccaggttcccatcaatggctctattctcctgtggggcccggggctcctgggcctaatcccccttggcagtggctctgcttccctgcctggctgccaacgcctcctccttgccactctcgaccccctcctgctggcagctcgggcctgggctcgtcctgcacacctggctgtctggctgccgcccccgccacccagcctcgccactccggtcagcttttccatctctgccatttcccaggccgcctggcccctgacattggcttctatgcatgaggagcttgggccggggccgggcccagaactcagggccaggtaggtggtggggacggaggtttgatcccagcccaccgtccctgctgggtgcctaggggcgtcctgagtgaggctgggcagtcccttgggccacgtcctcccagagcccgcccagcttcaccagcccctctatggtggatgggcagattgagccagcccgagccggggctccccaatcctctgcctgactgctcagggcaaacaagcacccccctctccctacagcctcgaaacatagcccagttgcaggcagggacctcctcgggccagcccatcccagagaaaacagaactgccagggatgggccacaagggccctcatccttctcggggcccgatgggctcagtcccgttatcccctccttcacgggaggtgaagggacctccgagatgtaaagcaattctccagaggtcacccagcacagcgagcctggacgccaggcaggtctgaccacagcctatgcttcacccaccacgactgccccaggggagtgggctccaccccagttccccatccagcttcaagggacccatgggacatgccaggcctggcagtgaccccccccaacagcaccctagcctcagatccaattcagctcatgttggttctgtccctcaagagcgactgaggggactctcacatccagcagtggggtgagcacatattcagagcagcccataggagggaccatctgctccccacaagcacagatggggaaactgagacccaggatgcagagaaagggaccacatataaagagtaccttgtggatctggtttctcctaatcctacaccaacccctgggattcctgctcgacctcagaaaggtggatggaggaccaggcgcagtggctcacgcctgtaatcccagcactttaagaggccaaggtgggcggatcatttgaggttaggagtttgagaccagcctgaccgacatggtgaaatcccttctctactaaaaatacaaaaattagccaggcatggtggtacacatctgtagtcccagctacttgggaggctgagtcaggagaaccacttgaacccaggaagcggaggctgcagtgagccaagattgcgccactgcactccagcctgggggacagagtgagactccgtctcaaaataaaaaaaaaaaaaaaaaagaaagaaaggtggatggagcggagtgccaggtctgggggctgtggcaggaaagggggttgctactgcatccacggtaagggactggagtccagtacagccgtccccccaggactccccacctgctcctggcccagcagccccatcctcagtcacacttcagtcagtgcacacacacacacacacacatcccccccttccaaattcttttatgtatttactaattga[140 bp omitted]cctc[134 bp omitted]ggcctcccaaaagtgctgagattacaggcgtgagccaccgcgcccggactctttttttttttttttttttttttgagacagtcttgctctgttgcccaggctagagtgcagtggtgcaaacttggctcactgcaacctctgcctccttggttcaattttcccacctcagcctcctgagtagctgggattacaggcgcctgccaccatgcccagctaattattattattattattttttgtatttttagtagagacggggttttaccatgttggccaggctggtctcaaactcctgaccttaggtgatccacccacctcagcctcccaaagtgctgggattaaaggcctgagcaaccatgcccggacttgaagattcttaatgggaggggactgccagccctgcctgggacctgaaaagtcctgatccagggctgggccagccatgacagtcttataaccctctcatctcaagagggaaccaccgacaagactcagtgacgcccccagaactgtcaccgagggactcctgggcggaacctccttacaccacccccacatgccagctgtcctgaccaagggacccctagctcatggagcacacctgacacggtgagtgcgcccaccatcctccatcccttccaaagtccttgaactgggagtggacgagctgggaccccctgattatcccatagaggtcaaggactgccccaccccaactctgccccagctgtcatccagctgtggtgtcctgccatatccacccctccaggagcccccagcgcccttcaaaaggcccccttccctctgaagggaaactgctggtttcctctgagcctcccacagtgaccgccagacccagtgtgaattcattcattcattcagctactgccactcattcattcattcacaaagttaccgagtacctaacaaggtgccacattcactcattcattcactcacaaatggtgcccacaagatgcttcattcattcattcattcattcatccatagttatcatgtgcccacaggtcctgggctctgctgagtatagtctccccgccgtccagggtccccaactcagggaagccagccaggaaacaatttatctccctcagatgagaagtgaggggagccccggaatgaagtgagtggggcagtgaggggaggacccagaaacacgtttcagcaagttctgc[137 bp omitted]atggcgaaaccttgtctctactaaaaatacaaaaattagccaggcacggtggcaggcacctgtaatcccagctacttgggaggctgagacacaagaattgctgggaggcagaggttgcagtaagccaagatcgcaccactgcactccagcctgggtgacagaatgagactccgtctcaaaaaaaaaaaaaaaaagaaaaaagaaaaaagaaaaatttagggagaatgaatgtcactctcaaagaccccggggcacccttggagggctcacagaagccactgagcacccctaaatctaaatctgatgccatcagcgatctcctgacatggcaactctgtcaaaagttctgacctccccttctaagaccctctggggagcacccccggtctcagaggcccttcactcagcagcaccacaccccgagacaagctgtctcctccaaaggcctcctgagaccgcagcccactcattttgtattcacacatgaggaatgcacacactctctcacatgaacaccaacatacgcgtctttctcagtttcagatcctatcccctgggtggcccccttcagccctttctcttgaagaccctcgataaggacctgatgggaacattccttgcttcagagacccctaggagcaggtcagccgacctggacttgcagcccagcttcaaatgaccctggagcagttaatatgcttctccaaccttcagtccctacctgtaagaaatggagacacaataacgtctgtcttactattaataaatatgcaaaatatgggagtgatgattaggtctgccctaattcaaatgcctcccaatggagccgcaactttggccgggccctgtttcacatatgctggaaatacagagttgaccaaattgattcctcagcttatagacacaccaggttgtaaagactgtttctttgggtttttttttttttttctttttgagacggagtcttgctctgtcgcccaggctggagtgcagaggcgcaatctcggctcactgcaagctccgcctcccaggttcacgccattctccttcctcagcctcctgagtatctgggactacaggtgtccaccacca[141 bp omitted]ggctggttttgttttgttttgttttttgagacagcgtctcactctgtcgcccaggctggagtgcagtggcacaatctcggctcactgcaacctctgcctcctggattcacgccattctcctgcctc[134 bp omitted]agtgctgggattacaggtgtgagccaccatgcccggcctattatttttattttttgagacaaggtctcgctctgtcgcccaggctggggtgcagtggtgcaaacatagctcactagagccttgaactcctggtttcaagtgatcctcttgtctcagcctcctgagtagctgggactacaggtacgcaccatcatgcccagctaattgttttacttttttgcagagatggggatcttgctattttgcccaggctggtctggaactcctggcctcaagcgatcctcccactttggcctcctgagcgccggattacaggtgtgagccaccgcgcctggcccagtttgtaaagattcttcatcagagggaagaggacttccagctccatctgggacctgatgagtcccaacctgtggctgagaattaaagggcatgatgcccatgaaacgctcaggctggaagg[222 bp omitted]gctgaggcaagggaattgctcgaaccagggacgtgaaggttgcagtgagccgagatctcgccactgcagtccagcccgggcgacagagcaaggctctgtctcaaaaaaaaaaaaaaaaaaggagaatgccagggcttgcgggtccccttcattcccctgcaaggctaccctcatagtagctcctgatccacctcacctaggacctctctggcggtcccagtaaaagcttcaggtgtccctaaccacccagcaccccctgaccacagaaagacctcatcccaccccaaaactttctcaaacatctgtaccgccctcagatgccccaatcatgactcatgatcccctctaacaatctctaccccgttggaaagtctcgtggtcccttagctccttggacctgataatagccctgtctcactccacaatttccccgagcctggcgatagcttgggaccgcctcagatgaccccagggactagcttgtcgcatgtcacgacctcccagtgctccccaaccctgctggaccccctaccaacatccatttcacacaagatccccccctacgaccgcccaagacaccccgatgacaaccacgtgcgtacccgcgagactcccagacccgttcgatccaaacagcccccagtaaccccacgacctccctgcggcctcggccctccaccctcggggcccggccggcgctcaccagcgacgctggcaatactggtggtgctgtaggctttgcggtggcaatcggtgccatcggggatatcccagtactgacgaaaaaccttcggcgccatagcccgcaatctcgatcccgcaccacggaccccgccagctcgggaagcgcaagggcagccgcggctggctatcgcgagacttctcgggctgcgcgcgcaacctttcgggctagcgggccggcaacaagtgagcaactttattgataggcgcggacatggacatggatcgcgcgcacgcgccggggaccggcctggaggaagagagtagcacgtgcatccccaggccgattcctagagggtgaaactgaggacgactgcgatcagtgcagacagatttcgctagtcccagctcagggagtcctaggttagggactactagaggcggggactatctactaggggaggggccgggctcagactgggacgggcgggactccagttgataggagcaagacatgacgaaacaatgactggggggcggggcatggcggggatgtggccacacccagtgtcagaatctgcatagcgagtggtcatgccctgtggtcagtcaccaagctggagtctgagcagcgtgctactgttttgggccgtggacaggatcaggggcggggattatcgggaaagtgaccaatgacaatacgagaagctcagcgggacgtggcctctgttcaccccgcggctgtcccacgccctaggccggatgaagtacacaggcgcttgacttgggggcgtggctagaattggaggcataacctaaaagggacttgaccaatctgagactgtataagggatgaaggggcgaggccgtgcctggatctacccctgacaggccacaggttcggggggcgtggtcaggcttgctgtttcgcggagtccgggccaatcctggtgttagcttccaagtagggaggggacagtatcgaaggtgtgaccaatcttgtttccagagcctgagttgcgcgagccgccaaaggatgtggccagcctgggggcgtggctgtcaagatcttgtccaatcctagagtgagcccaaactcaggggcggagtttcatgatcccggaaccggtggtagtgtttgggtttgaggagagcacgacccagccctctggggtggggtctagcggggtcagcgaccaatcgcgccgaggtctagtggggcggggccctcccgggggcggggcctgtgccagttccgggccgcctgggggcgtggccgggcctgtacagcagcctgggccatgtcggcgccgccggccctgcagatccgggaggcaaacgcacacctggcagccgtgcaccggcgcgcagcggagctggaggcgcggctggacgcggcggagcgcacggtgcacgcccaagccgagcgcctggccctccacgaccagcagctgcgcgccgccctagacgaactgggtcgcgccaaggaccggtgaggcccggggccggccaggtggacttcaccgaggcggtaggcggaggcagagccgaggctggaaagcgaggaagggcagggggaaccgtgtgcacttgtatagacgctagactgagtatcggattgataaaaacaccaaaaaactcgaattagtaatcagtatgtaaagttgcgagaagtgacacaggtgtggacctctaacttcaaacaggcccactttcccacaggtgctgagcgacgcagggaccacagaccgcccagcgtaggcattgggagccatagcaggctcttcagcaggggaggaggggatcatatcagcattttaacttttaaaatttattattatttttttgagacggagtttcgctcttgtcgcctaggctggagtgcagtggcgtgatctcagctcactgcaacctccacctcccagattcaagcgattctcctgcctcagcctcccgtgtagctgggattacaggcgcccgccaccacgcccggtcgattttttgtatttctagtagagactggttttcgtcacgttgtgcaggctggtctctaactcctgacctcaggtgatccgcccgcctcagcctcctaaaagtgctgggattacaggggtgagccaccgcacccggcctaaatttattatttttgaggcagggcctcactcctatgcccaggctggagtgcacctcgacctccggagctcaggtgattctcccacctcagtctcccaagcagctgggactacaggcgtccaccaccacgcatggcttattttttgtatttttttgtagagacagttttgccctgttgcccagtttggtcttgaactcctgggctcaagcagtcctcccacctcacccttccaaagtgctgggattacaggctaagccaccatgcctatctattatttttgagagagggtcttgctctgttgcccaggctggaatgcagtggtgcgatctcgactcactgcagtctcaccctccctcctcagcctctcaagtagctgggattacaggcgtgcgacagcacacctggctgatttaaaaaaaaaaatcctttagaaatggggtcagactatgttgcctaggctggccttgaactcctgggctcaagtgatcctcctgcctcagcctcccgaagtgctgggattataggcacgagccaccatgctggcccatatcagcattgttgaagagtccctctgacagctgaggatgaaagagatgagacaggcacccagggaggtgggaggagctgggtcccaggtgggaactattacttcagagctaattggacatattcatttttaccgagcacctgctctgtgccaggcactcattcattcgtcttcattgagcacctactgtgtgtcaggcattctgctgagtactggagcacatcagtaagacttagccttgcccattgggtatccacagtccagtggagagacagacatgtcactgggcagttacatcattggtggccagcggccatgatggaggggcatatggggctctgagggatctcagagtgaaggcttcccagaggaagagcctactaagaataggtgggaaaagataatggaaaggaacgaactgcaggaagagtg[132 bp omitted]gccaacatggcgaaaccctgtctctactaaaaatacaaaaaaattagctgggtgtggtggcacacgcctgtagtcccagctactcgggaggttgaggcacgagaatcgcttgaacccaggaggcggaagttgcagtgagccgaaattgtgccactgcactccagcctgggcaacagagagagactctgtctcaaacaaacaaaaaaacaaaatgccataaattaagtggcttaaacaagaggtttgtttctcagcgttctggaggctggacgtccgagagcagggtgccagcatggtcaggttatgggagggccctcttccgggcttgcagatttctggcttctctctgtgtcctcacagggcagagagagccagggagttcttttgtatctcttcatataagcacactaatcccatcatagagacccccaccctgacaacctcatctaaccctaatcacctccaaaaagctccatctctaaatacccttctgctatggttagactttgtgtttccacccaaatgtcagcttgaattgtaatcccataatgcccacgtggtgtggaaggaactggtgggaggtaaatgaatcatgggggatggtttccccttcatgctattctcatgatagtgagtgagttctcatgagatctgatggctgggcgcaatggctcacgcctatactctcagcactttgggaggccgaagcggtcagatcacctgaggtcaagaatttgagaccagcctggccaacatggtgaaaccctgtctctactaaaaaaaaaaaaaaaaaaaaaaaaaattagctgggcatggtggcacacgcctgcagtcccagctactggggaggctgaggaggcagaattgcttgaactcgggaggcggaggttgcagtgagccgagatcacaccactgcactccagcctggatgacagagctagattccgtctcaatcaataagggagatctgatggttttataagggattccccctttgctggtctctcactgtctctcctgctgccctataaagaggttccttccatcatgattgtaagtttcccgaggccacccccagccatgtggaaatgtgagtcaattacacctctttataaatcacccagtatcaggtatgtccttagagcatcgtgagaatggactaatacacctcccattggggttaggacttcatcatatgaattttggggagacagaaagatgcagttcaggctgggtacagtggctcagcctgtaatcccagtactttgggaggccaaggcgggtggatcacttgaggtcaggagtttaagaccagtctggccaacatggcaaaaccttgtctctactaaaaatacaaaaatcagtcaggcatggtggcgcatgcctgtaaacccagctactcgggaggttgaggaggacagtttgaacctgggaggcagaggttgcactgaactccagcc[131 bp omitted]ccagcatggtgaaaccccatctctactgaagatacaaaaaactagccgggcatagtggtgggcacctgtaatcccagctactagggaggctgaggcaggagaattgcttgaaccctggagccggaagttgcagtgagctgagattgcaccattgcactccagcctgggcgacagagctagacttcgtctcaaaaaaaaataataataaaataaaatataataataataataaaaacaaagaaacattctgttcataaccagggaggaccctgaggcagtggtgaggaatgcgggctttatcccaaaggtgatggggaacctcttgcgggtccagagcagggaggagcaggtgctgtggtcctcagttctgtaatcacctcctcttgccttcctgccagtgagattgccacactccaggagcagctgatgacctcagaagccactgtccacagcctgcaggccaccgtgcaccagagggacgagctcattaggcagttgcagccccgggctgagctgctgcaggacatctgccgccgccggccacccctggctgggctgctggatgccctggctgaggctgagcgcctggggcccctgccggccagtgaccccggccacccaccccccggtgggcctggtccaccccttgacaacagcactggggaagaggcggacagggaccacctccagcctgcagtgtttgggaccacagtgtgagcccggaatgcagattacagaatggagacagaaagccactgctgtcagtgtccttgggagtcaccagcaccctgcagggggaccctacggcagagccaaagtcctgtctaagcatcagaacaggctgaacagtcaaaaagttttcaaataggcccacaggccaggtgcagacgtttaacccagacagaagtgttcttgtttgtttttaagctttgaatcagtcacccttgctaaaaacctggcaatgcaaacacaaagatctggatttctggcaagacttggccaagcttgcctggagttcagggcaccctctttagccagggtgtgagtttctgttttttgtttttttttttttaagacagagtcccactctgtcgccctggctggggtgcagtggtgcgattttggctaactgcaacctccgcctcccaggttcaagcgattctcctgtctcatccttcagagtagctgggattacaggcgcccaccaccacacccggatattttatatttttggtagagaccggggaggggagggggtttcaccatgttgaccaggctggtctcaaactcctgaccttaggtgatccacccgcctcggccttcgaaagtgctgcagttataggtgtaagccaccgcgcccggccctagcctagcttttgtagcatgcaactgtctcctttttatacgccctaaagaatatatttttgaactccttgtttctgcgctgtccttcttagcccaggacattcagggtgctttgcttgttgtcaaaccagggaaaggagaaaactcctgtgcctttctgggccagcctgtcaccctggcctggtcggcagccattcccctacctcctcactcaggaactgtcacaccaggaaccggcgaggggcacagcctgtttcagaccagaaaggtcggaggccacccacggccttcaggatggcgcccgcctgcctgcctggcaacagtgacccctcagtgcagtaacaatgggcccattttctcctctggatgaacaaggaggggggttgtttgtacaaaggaaaggcaggctggggcctgtctgtgctcaagaataaaccggatgatttcctggcctgggggcaagagggaggccctctgtgttatttgtgcctcctggtagggtcctgctgggccaggtagaatctagggagtgtaggccaagcactctctacagcgattgcatctaatcttcgagtttccctgtagacacaggctttgtcctcattttacagctgtggaaagtgaggcccaggccgggcgcggtgtctcacgcctgtaatcccagcactttgggatgcgggtggatcacctgaggtcaggagttcgagaccaccctggccaacatggtgaaaccccgtctctactaaaaatactaaaattagccgggcttggtggcgggtgcctgtaatcccagctactgaacccgggaggcggaggttgcagtgagtggagattgcaccactgcactccagcctgggagacagagtgagactcagtctcaaagaaaacaacaacaacaacaacaacaacaacaacaacaacaaacagaggcccagaggtgtgaagggaacacactccgggtctggagggccagggccacttccaattctgggggaagttattgctgaaattctgttttctttctttctttcttttttttttaaagagacaaagtctcactgttgcccaggctggagtgcaatggtgtgatcacaactcactgcagcctcaaaatcctggtcttggctgggccagtggctcacacctataatctcagcactttgggaggccaaggcaggtggatcacctgaggccaggagttcaagaccagcctgaccaacatggtgaaactccgtctctactaaaaacacaaaaattaaccgggtgtggtggcgcgtgcctgtaatcccagatactcgggaggttgaggcaggagaatcacttgaacccgggagatggaggctgtagtgagccgagattgtaccactgcactccagcttgggcgacagagggagactccgtctcaaaaaaaaatcctgggatcaagctatcatgctacctcagcctgccaagtagctgggaccatgggcatatgccaccatgcctggctgcgtttttgcattttttctagagataaggtctcattacattgcccaggctggtcttgaactcctggcctcaagtgatcctcccgcattggcctcccaagaaattcttactaaacatttacaaatgagatgccaaaacagcacttcagtaatagtggttatattttatagttctctacacagaaaaaaaaatgctgcttgtaacactcatagacatgaaagtatttctctgcctatttaaataattctggattgcagtgagccaccaggattttggcagccagatgtcaccatgatttctcataaaactgatgatgttacatcagtggtggcctgaatcaagatgctgggatgcctgtaacctacagattggtttcagactccaaaggcaacttttttttttttttttttttgagacggagtctggctctgccaccctgccacccaggctgaagtacagtggtgtgatctaggctcactgcaacctctgcctccagggttcaagtgattctcctgccttggcctcctgagtagctgggattacaggcatgcaccaccatgcccagctatttattttttttagtagagatggggtttcaaaatgttggccaggctggtcttgaactcctgacctcaagtgatccgcccacctcagcctcccaaagtgctgggattacagctgtgagccaccgcgcccagccctggcctctttttttaagttatttatttatttttgagacagagtctcactctgtcgcccaggctgtggtgcagtggcatggtcttggttcactgcaacctctgcctcctgggttcaagtgattctcctgcctcagcctctggagtaggtgggattacaggcacccgccaccatacctggctaattttctttttttttttttgagacaaagtcttgctcttgtcccccagtctggagtgcaatggcacgatctcggctcactgcaacctccgcttcccaggttcatgcaattctcctgcctcagcctcccgagtagctgggattacaggcacataccaccacgcccagctagtttttcgtattttaagtagagacagggtttcaccatgttggccaggctggtctcaaactcctgacctcaggtgatctgtctgcctcggcctcccaaagtgctgtgattacaggcatgagccaccgcacccggctgactaatttttgtatttatagtagagacagg[147 bp omitted]taacccaggctggagtgcagtggtgcgatcatagctcactgcagcctccaactcccgggctcaagtgatcctcctgcctcagccttccaagtaggtgggattacaggaacacaccaccatgcctggctaattttttgtagtttttgtagagatgggggggtctcactatgttgcacaggcgggtctcaaactcctgggctcaagtgatcttcctgccctggcttcccaaagtgttgggattacaggcatgagccaccgcgctcaggcaaggcaacttctgacaatataattgtgctgtgagcgaggtaaagccaggcttggagaaggctccgattgatgatccttgggtcggggcgaacagtgggtcctcaaacagggcccacgtttcaagtcctggaaaacccacctatcttagcgggcaggtatatccgatgtctccgttgaaggccttcagtgaggtggcttcgtctcttgaggtttatgtccaggatcagggctgctcttccactcggggtcacaacctctggctcaccaccttgtcaggagccagcccactaagtcacgtttcaggcctgaaaaccaacaacaaaagatccgtaaagacagaaatcctgggactggctcctaacaacggccagtgacaagctttgtggcagtgagcagaggtgtccctcaggctcagctcagtctctgtgggttgcaggacctgcccttggaggtgggcctgggtgggaggtcttagggccccaggacctgggccacctggggctttttttttttttttctttttgagatggagtcttgctctgtcgcccagactggagtgcagtggtgcaatcttggctcactgcaagctccacctcctgggttcaagcgattctcctgcctcagcttcctaagtagctcggattacaggcgcccaccatcatgcacggctaatttttgtatttttagtagaggcggggttt[132 bp omitted]gaaacaagttctctatatgttccccaggctggtccaaactcctgggctcaagtgatcctcccacctagacctcccaaagtgctgggatttcaggcatgagccgcagtggccggtcagaacctggggcccttttgaactttgattcctcagcaattttgtcagccctggctcgggctgagaagcccctgtgaagccagagagggaaagggacctgtccagggtcacacaggaatcatgcgtcaagcctccccagccacggacttgtctccatccagggcatttcagcccctgcagggcagtggcctgcccctcctccttggagccaggaagggatgcagtgccacagggatctggctctgtcccaggccctgtggggctggcagttgagtaagcagtcaggctgggcgcacccatccctcccccactccccactgcccagcacagtgcattcatgcagctgggccccaccccatctccagaggcaccttccactagcaacagtctccccaggcacaacacagctaacacaaggccccgcaggcaggactctgggacagacgcaggccaggtgagcatctgaacaaggggcagtcggccagggtgggcttgcgggagtccccaccttgacctctctcccttccagctgcccagagcccagaccaagcatggacgccgtggatgccaccatggagaaactccgggcacagtgcctgtcccgcggggcctcgggcatccagggcctggccaggtgagctgtcccctctcaccttcctgaccccggcccctgagaccactgttccaaccgtgtcccctgcctccaggtttttccgccaactagaccgggacgggagcagatccctggacgctgatgagttccggcagggtctggccaaactcgggctggtgctggaccaggcggaggcagagggtgtgtgcaggaagtgggaccgcaatggcagcgggacgctggatctggaggagttccttcgggcgctgcgggtgagcccccacctcacagtcaaggcgtgtgccctgggcatggggcgacagaggatgctgagatgcggagacggggactcctccctaagagctgctgttaagaggcgcctgctggggcatacagccccagtgctctgcacagcgtcttgggggtttgggtgtgctacccaccacccccagtcaccacctcctgtcccagccccccatgtcccaggcccgggaggctgtcatcgcagctgcatttgccaagctggaccgcagtggggacggcgtcgtgacggtggacgacctccgcggggtgtacagtggccgtgcccaccccaaggtgcgcagtggggagtggaccgaggacgaggtgctgcgccgcttcctggacaacttcgactcctctgagaaggacgggcaggtgggtggctgcgcggggggccccctccccaggcagttcctcggccgtgccccctcacggccctctgttcccaggtcacactggcggaattccaggactactacagcggcgtgagtgcctccatgaacacggatgaggagttcgtggccatgatgaccagtgcctggcagctgtgagcagctccggctcagccctgctgccctggcctgtcactccccacccctgccggagacctcccttccctgggccccttctctcctgggcagccacaccacagagcggggaggggcaggtgggggaatggaggctgcaggactggctagaccaggtccctgccggtccaccaggcggaggtgggacaaaggtcctaacaggagtcactggctcaggaccccagggagaaacgctctccccacccacgccatgctgaccagagatcttgcagcccctgtggatgcccccgccgaggtcccccgatccccgcacccggactgctgctccctgcccctcccttgcgggtcccccaggaagccaggtgaccccaggtgggaggctgtgtgtggaggccatcctggaaggaagtttagacctgcccaggtgtggagcgaggggcacaggggcatcctaacctcagaaactgaaataaagcctttgaaaaaaaaatctgtaaaacatcaacccccaatcagaagatggcaaatggggaataaaaatagcaggtaacatgtccagcgggcccagtatctacattctggtgagcggcccgaggctgggagctctgggcgggggcagaccggcggggccttgcagcaggggtgggggtaaagtgcgggtggtggtggagagaacagggctgtggctggaccccagcactggtgacacgctgggtgggagcatgaggccccaggctgctggaggtcctcgcccggggaggtggaggccgttcctggtcaggggcttcctgaggcccctggggcatgcagaggccagggttttagttaaaagtttaatgtagttcccaaatacatttcatatgacaatcttacataaatgttccaaaacacatgggcgttatctcgttgtactcgtcactagctggctaaggcttaaagcagagacgtgtgactgggtctctcgggagggcctctggttcttcccgggctcaggcttgctgggggctgggggccagggctctggcgacctagaggtgtggacggcacagctgcaggaggccttctcttaaccctccgagagtgggactgggagatttcctctgaagtcccaaagaggccctgtgcccaggggacctcctcctcggcctcccaggtgggtggtgcaagctggctcttggccatgctccaggctcgggtgggcacaggcgtccactccagtgtgctgcgtgcttgtgagactgcctgttctgggaccagcccctgggctcttccaccaagatttggtgagggtccccctctgcctctcacagaagcccctggccctggactgtcctgggggcagggacacctgtggctggggaagggatggccaacagcgggaagcagtttgcgcctggtgcctgatgatggtgaaccacgtgacagatggagacgggagtcaggggaccctggggacccttccaggtccagtgaccttttcccagacaggcactctccaggcctaggacagacagggccccaactcctcatcaccccatgacttggcctggaggaacctggggtgggaaacaagtagtcccccaacctcagaggccagaaccacaggtgggggacagggacctcgacagagctgtgcctgctcaacgctcgagagcatcttaacctaagaaaccaaaacaaagccttcgaaaataaaaagaaaaaaagatgtaaaatatacacccccaatcagagaggggaagtgggaaatgaagatagtagttaacagcacgtccaatgggcccagtgtctacactcgtacgagcagccccccaagctgggcgggggtcccaggcctatagttggggagccctgggcaggggcagagggctggctgctccccacaaaggcagggccccacagcagggtgggaagggtgtgggtggcggagaagccaggggctctggctggacccagaggctggcgacacgcggggtgaaggaacgaggtctccagtcccagtgagaagccgtgacaagtcttaatgtgccatttcaattcaaaggaggggagggaggaaatgttcttgtttgttcgctcatcaatatgatgaggtctcgtgtcccaaaccacattcaggcagttcccgagtctgcttttgaacaggacgtgcgggtccagactgtggccggcccagtggggtgtgtggttcccggccccgcacctggacgctgccggtggggtgggggcgggtgggcgggtggatagacggacaaagcagcagcctggtgtgcagccgggctcccggccgctatgtgctcccggtcgtctgcccgtccccttcgtcaccagcacctgcagggaagcagcagccccgcatcaggatggagcccgcacttcccaggtctggccacccccgccaggagatcagcactggatcaaggatggcgggcagctctttctatcccccccagggtagggaccacccgactcaccagctgcggtggcccctgaaggagccaggacatcgtcatcgtcgctgtcgtcctcctcgttggatggggctgccccaggctcaggcgcgggcatcttggcctcctgctcctgctccacgcggctgcgcagggccaggatgcggtggtgcagggctgcatacaactgacctgtgtccttggagctggcctgggaagggaggagggtatgagacccccggaccccagtcctaccccctcctgccttctgcagaacacaagtgccaagtcccaaggttcagaggtgacactgccacaaggccttgtggggaggccattggccctgggcctgccggcctctccccgaaaggatgccaccactcccaggtggctgggaatatcccagaggtcagggttggtggactcgactgtgacaccatgacataggagagaggtgaccgccccacagggctgttagccctgaacacatcacaacccctcagccaaaccccagcggcttctctgggttgagaagaggacaaggaccatgatctctattcctgaaggctgggactggcgggtcccatagtgcttcttgtgtcccaggaagcaactgaagcccctcccccctcccctccccaccgtcctgcctgatctgtgtgcccaggaacccccacagggctggcaggatgaggggtcccagatgcacccgcgtggctggctcaccgagatcaggaagaccttcacgccctggtcctcggtgtccatggctgtgatgcgaatgctcttctcgctggccttgtcgatctgcatctgggcccacagcttggtgttgaggatcagtcgcaggctcccctgggtccgcatcactacaaccaacaaggccactcagccctggcccccacaccggccccctcacaaacagccagctccaagagccaacacagtccagatggaaagcgacatcaccgcgcaaaagcccatgatcctcccaggacccacccacagagcaagacttctccctgaggccagccctggcacacctgctcccggggcggggctcctcctccccaagcctggaccactgaaggccacaactgcaggtggctgcacaggctggtgctgcagatcagtgaccagaggccacatgcagcttgtgggaggttgtgtttggtccacacaggtgggcaccaggatggcagttcccttggagaaggggggattagagaggagtacggggtgggctgcgggaggcaggggctgacactcaaggtgcatgcgctttctgtgtgtgtgagacatcggcctccatgggagtccacgtcctcctgactggcctcccctgagtgggccagccctgccctctggtttccttaggagaaggcagagtaggaccgcagcttagcgcttccatggagaggagacgagaggactgtgggcagcagattacggaggaaaatgggagggccctgactcttctagaggatgcaacacccctgcgcctggcctgggcccaccccgtggactcagccaagcccctaccttcctgccagccgcctctccccactggagcaggcctggagacggtcagaaacttgtccccctgccctggcccagcgaacagacctccctgagcccaggtgcccacctcagaggccgagtgggagaaagacagaggtgattttgctctccctgaagctggggagggtactgctgccacggggctacaggctgatgacccaggcagaggggatgacctgggggctcagggctctatgccctctctttccatggacatttgaacatttccacgagacaaaaggaaaaacacaagaagacgtccataaggctgggcacagtggctcaagcctgtaattccaggactttgggaggcctaggtgggcagatcacctgaggtcaggagttcgagacaagcctgaccaatgtggagaaaccctgtctctacttaaagtataaaaaaattagccaggcttggtggcgggtgcctataagcccagctgctcgggaggccgaggcaggagaatcgcgtgaacctgggaggtggaggctgcggtgggccgaaacgaagccactgcactccagactgggcaacaagggcaaaactccgtctcaaaaaaaaaaaaaaaagacgtccatggggaacaaaagagcagtcccagcctgcagggacatcccctgtctgttctgaccagagcagtgtttctgattgaagtgcatgaacactacccttcaagggggctgcttgagttactgctgggcctgaaacccatatttatgaaaaggccagaagacactttgatttgggaagataaaacaaaaagatggtcccagcgcagtggcccacgcctgtaattccagcgctttgggaggctgaggtgggaggactgtttgatgccaggagctcaagaccagcctgggcaacacagggagacctgtctttataaagacaaaaataaaaacattagccagacgtggtggtgcatctgtagtcccagctactcaggaggctgaggtgggaggatcacttgagcccaggaatttgaggcgatgatcacactgtattccagcctgggtgatggagtgaaatcagctttagaaggaaaaaaaagacacgcccacatttcaaatgtgcacacacacaggctgatttccttaagtgggtgtgtgtatgcaggtactccaagctaaatgtccaccaatagggaaaagtccattgactgtcaatggaatattaacatgaaagcttttcaaaaacagtatattttatttttttttgagatggagtcttggtctgtcgcccaggctggagtgcagtggctcaatctcggctcactgcaatctccgtctcccaagttcacgcaattctcctgcctcagcctcccgagtagctgggattacagacatgtatcaccatgcccggctaatttttgtatttttagtagagacagggttttgccatgttggccaggctggtcttgaactcctgacctcaggtgatccgcccaccttggcctcccaaagtgctggggttacaggcgtgagccactgcgcctggccaaaatttgtctttatcaagagattagacttgatgtttgatttcattttcctttctatcataaacctgccactttgtcagaaaatcagcttaaaaacttccatagacttttgtccattttgacactaagagggtcacggacgagctggcagctggagccagtgtgtgagggtggtgttgagggctgggtgcagggagggggtttggggggcggctctcatgggagaccgactctgtgccttgactctcacaagggtagggtcaggatctcccccgcttcattccctttggaattgcatagtccccagccctccccatggggacccggccacagcccccgccgtcggcagctcacctagtcgggactgtagtgtgccgtcatcggtggacgccatgtcattgagtctgagcagcccccggcctctctccacccaggactgtgaggtcttgtcaaagacaaacagcttgcactgcatctggaacacagtggccgccggtaagcagggaccccagctggtgtcctgctgcagccacaccctgagagtcgccctttagcctgtggggactgccagggccagccaacgacggcctgggggccaccttggtcagttttttgtcctgccctcaagctagaacaggctttacattgtataaggggtatctgaaattaaaagaatcactaaggaaatgaaaagcaaaacaacggtgagaagcctctctgcgcactctaggacggctatacccatgtggggaagctggaaccctcacacactgctggcgggaaggccgcatggtgccactgctgtggaagagtctggcggctcctcaaactgcttaacaaggaattaccacatgcccaagcaattccattcctcggtatgtacccaagagaaatggaacatttgttcgtgttcacacacagatcgcacatgaacgtgcacagcaccatcattcacggtagccaagtctcaaggaggaatggagtgacacacatggtccgcccctacagcgcatctcactcagtcttaataaagaacaaggctccgacccccgctgcaacgtggatgaacctctggctcagcgagagaagccagacacgaaaggccacatagtgcgttgatgccatttatatgaaatgtcaaggacaggcaaaaaacagagacaggaagtggatctgtggctgccaggggctggggagggaggaggagttactgcgaatggacaatgctctttctgggggaatgggacagtgttctttttgggggcagaaatgttgtacgttagattctggtgaaagttgtctgactctgtgaatatactagaaaccacggaattgtatgctttaaaaggatggattatatagcatttgtactatatttcaatacagcagttttgtatatataaacaaagaaaaatacgagacagacacccctacatggctttccacataccccctaagtcaatctctttcaacatgaacagatgacaaagtggtaagtgggaaaaaagaacagtgctcttaagaacgccacgatacgccacccggtttacagacacagacacctgcttatgtgccacgggagaggaagcacatggatgctgcccaagccgggtggtgcggcctgaggagcaggaatgggggatgccaggaggggacggtggggtggaacctctggccgcacctgatcttttccctacgaagacaccacaggatgccaggtgacaaataatacagttgccagctctgggcgacaagagaatatgtttggtatgacagtctttgtcattc[137 bp omitted]tctactaaaaatacaaaaattagcctggcgtggtggtgcacacctgtaatcccagctactcaggcgactgaggcacaagaatcccttgaacccaggaagcagaggttgcagtgagccgagactgtgccactgtactccagcctgggtgacagagtaagacattgtctcaaaaaaaattaaaacaaaacaaagaatgtctcaaacagatcctcctcctctgaaaccaaagacatgcaagaagcccctgagcctaagctctctctacaaacgccaccaacaaagtcccagagcgtggggccagtggcccctccgtcatctcaggggcaggcctgtgtgctcagaggatgtgggcccagcccttgcggttggacccccaggtgcatggaagacccagggccaccgaggaggggccggcccctcacctgtaacacattgctctccgcctcctccccggtgatgacttccactttttccaacaaacacttccgcgctgttgccttggtgtaggcggctgccgactcagccagggactctgaaaagttattggccaaaaagactgactgattatttggcgagaggagagccatctcccctcatccgacaggagatgagagggttggttctggtctcaaggacgcctgctgcccctggcaggcctgccccggcaacccaagtggaccctagacacagccagagcatatggcctcagaagctgcagggagaccatctgggggccaagtgtggccccagactctcgtgttcgtgccgagcagtcgacggggggacagtgagggactcctccacgcctgctgcctgcgcctccccaccctccccacggccacaaggcgacacaggccctcgagttctttatcacaaacccttgctcactgcaaggcagggccctggagctggttcacatgtggttgttactgctgcgggagtcgggccccttatccctcccggctgggggtgtgaatggacccagcatcccccaagatgacctaccatgagccccatgctgtggtgggacgctaacatacctttctcaggggtggcctcctgggacgaggactcagaccctgactcggcagctgcattttccctgttggcatctgaactgacctcgtttaattttggggggctctgcagggacacaaaagcatacaaggaagagggcacttgtgtggtccttcagcagcagctctgagcacctctctgcctggcccccaacactacgctgcccccagcactcctgcccactcccggtgacaccctgaactgcctgggagctccccacgtggtccctcaggcatcactacggggtgagtgccaccagccgacagtcccctcgagccacactggtcactccgtctgggtgaggcaagactttgaacatttcattgaaatagaaaaagcacagcgtggccacgaaggaagagaagctgcagagtacttaatgcagcctaactccagacagagctagagtgaccaggcggctcaggacaggccctcacgcagtcgcaatggagctgggtggaatcaggaagaaaaaggaacatgtgtaaagaggtaggcaaaccattctagaaccctctcccaggctggctgggctcctgggaacggagatgggcctttcgtgcacccaaggccttggccgcggttatgctcacaggagcagggaggccagcaaccctgtccaccagcacggctggctccgtcccacaggacttttgtcagttggcctggtggggaggaaccatggaccccgactgccagcaggaccctgcagcctccagggaagcccatcttgggatgaagttggccctggtcagcacggaggagccgggaaaagcgaatgccagttcgtaggcagccagtggccctggccagttttcaggctgagtctgagcagggtcttccctctctcacttgctactgaaggcatccccatctcacataggacgacacagcagccctgctctccatgtccccttgacctgtggctggcgccgagagcctctggtccctgagaacattcccaacacagccactcaccaaaactcgctcgctcatgttctggccaaatacaaatttgttgctggaggcgtcggcactattggttgagttctctaaactgaagagaagatgtgcaatgagtgtggggcgtcacgtgggaacgtggccaggcaaatgtatgggtacccatggagcacacactgacacagagggcacagtggaggggcctccgccactgtgcacggggtggcgtgtcagaggcaggaagccacacacctccctgtgccattgaaaacattaacccttagctcgccctgatggaggggccccacagcatgagggaagccaccttccacctgctctacccgcccatctcccagtcgggacacgctttcttctgagacacctggaggggcagctggtccgtgggtagcattacccccagccatgtcagtcaaggacatgatgaggtctttgccccaggtgcccaaacccagaataagggggcgcctgagtcgcctctggcctgctctgttctgctctgggcatgaggtccacaagacagagggcacactccaagggctgggctgtagcctccatgggcccctggacaaccccacagaactctggtcctgtctcaggcgtccagtgaatcccaggacaaggcccaccaccctggcccacccaaggttgtgcccagagtggggaatgagagagaggggcctgagagcaacctggattctgggcctgagtcgggcacggggaccacagacccctctctggcagaagccctcgcggccacctgcatcgccatgccaggctggccgctgacaccgagacacacacctggaactgatatactggaggaaatagttcgttgcggttggcgtgtctgcgctggggtgtccagcattctccatgtcggcttcgtccacgctctcatttatcagctgggaatgagacggagcgctcagtaatcgggggtgggggggtgcctggagttccacagctcagtgtctgcagaccccctgagctgcatggagctgctcggagccatgaaccctctcctgtacccgcctgtgtgtgtgcgcgtgcatgtgctggggggcagggctataatcaactccatcaccttttgctttaacagttaggatggaaagagagctcatgaagctccaaggagccttttccaccttgttacaaaaccacgccttgttataaaaccacgcctaagctggcctctcggtcaatgcttcataccaataacacaacgttacaaagctgacgttttggggggtttactatgaacatgatagaagcagaatttcttgagggcctctttcctaccagctgctatgctgagtctgtcaaatgcacgatctgctttaatcctcacgaggcctgggagggggatgttagggaccctgtttgaccaacaaggaagcagaggctcagagggttaagaaaccatggctctggctgggcgcggtggctcgtgcctgtaataccagcactttgggaggctgaggcggcggggaatcacttgaggtcaggaattcgagaccagcctggccaacatggagaaatccccacctctactaaaaatacaaaaaattagctggatgtggcagtgggcgcctgtaatcccagatatttgggaggctgaggcaggagaatcgcttgaacccaggaggtggaggttgcagtgagcagagatcatgccactgcactccagcctgggcgacacagcaagacttcgtgtccaaagaaaaaaaaagaatccatggctcaagtttgccctggaaggagaggctgggatttgactgagactgcgaagtgcacgtaagcctctgacttctgcaagaagccaaccccaccaaattcaaagcagctgtctccccagactcaaggcagagattccacagggcctgaactccacaggccaagcccttccccgcctcttgccctccctccttggagggaacagcccctgagggactcattattttgcctaaagccatggcaacagcaacatcaactttccacgtttctcgacttgggcttctgttggacggtgagtaacagaaaggaaagcagaaaacacaagccggtgctttctgcatgctagagaggtttttgtttatttcagggccctccccgtcgacactactgacatgttgacactgggcccagaacattccctgtggtgtggctatcctgggcactgcaaggggcggagtggcatccctgacctccagaagtacctcccagttgtgacaaccacaaaagtctctagacacagccaccgataccgcctctcgagctttgaaagaagcttcttgccagtggagctgctagagatgccgtagcacattccatgtctgtggctgggaaaggtggtgctggctgaccctggtcttcctagagtcccagtgcatggtccagggccactgtttccaaccactgccatcccttccccaccacacaatctccaaactaggaccacatgtctggagggcagccaagaggtggcagacgctttgctccctttcaggagagaagacagtgttgtcaccccaccctgccccacttaaaaaaaaataaggtgacagttcttaatgggggcgattctactccacagggaatactggccacgtctggggacatttgtggttgtcagatgtcaggagcattgggtgggtggaggccagtgatgctgctcagcaccctgcagtgcccagggcgactcctcagaaactaagaatggtccagccgtaatgctgctagtgctgaaacagagaaaccctgaaatacgggaacagaaacctctgggcagagctgagaacactggaccgtgctgtctttcttctctgctatgaaagcctgaggcctcaggttcagtcaccttccctgtccccgctaccatgagaaccagggaccctgacttgagaagtcactgcaggtgagggctccgaagcctgggctgctggtggggaagtgccagggcccagcacacgcacaccagcagcagactgtgccgtgagccatggggctgcctcgctaacaccttctttgtcccacgctcccctcccctgttaaaaggaaaatctacctacttgcctgctgttgaacctggggaaggcataaaaagtcaatgtgctggttcaacagctcacataccttaactctgtccctcaagttctgcccaaatacaaaggcttgctgtgtggcggggtcttttttctcacaggcttcctcttcagaggcattgctggactcatttttctggggctctttctcctatcaaaaaccaaaacaaaacagagtaatcaaaaccagtgccacacttggcccagacggatgcccagcaatcccacaccagatcatgtactccacacgtctcctctgcatgtgcctgcactcccagctactcagaaggctgagacaggaggactgcttgagcctgggagttgtagtgagctgagatcacaccactgcactccagcctgggtgacagagcaaaaacctgtctccaaacaacaagaaacacctgtgccctgcagaagccttagtgccggcagaggacaggaaataacctggttgctcatcattggccaaggaatgaaataatttacaatagaaaatatgggggaaaaaaagtacagcacagctattaccaccgagagggaggtaggcctctgacatgcccacaatacatggatcagagaagagagcagcttgtgggacacggaagtgcgattccatttctgttaaagccaatccagtcccgtgtgtgtggtgtgtgtgtgtgtgtatgtgtggtgtgtatgtgtgttgaggaatgcccaggaaaataagtcgggagagagaattcaaactactgacggaggttacccgggaacctcttagctggagggtggctcctgcttgttactttctaggatttccattttgtgtaaatattttcaacatgtaggcatgacttttttgtaactaaatatcctaagaccaaatgcatttatcttgagataatggaatatggagttgctagtaatttgtatatgtctttcctataccacatgatgaaaaaggtgttgtagaatttgaaaagaaattttaaaaggcttttggcagatctttggagtctctggcgatgtgtacagtggacatgaacgtgaggcagggagtgttttcctgggagatgtcgtgaagggacctgacaaccgtgaactcggaggtgagaaaggctgcaggcagcttctgactggctcagcgtgtccagcgggcagggaagcctggagttacaatgccaggcccagaatcagcggatcacagcgctgagggcactttctggtccaactgtgaaggaagtgaaaagtgtaaatgtttctctactgtgctccctagaaattctgctactgctgacttcacgctgcatccttgtgcctgtgcaagagtgaacgtggctttttaaaattaaacacacaacgtgtttggcgacctggaagtcctcagaggatgggctaatccccagccccactggggccgcctgcatcccgtccagcagaaacactccctggctcttggctttctgcgctgtgtgccccctgctcacaccgactggtgctaatcccgggtgggtggagcccacagagtcacctgagatggggcaggcaaacagcaaaatgtttctgactacagggtatgtctatgacctggcggagcctgcttagaggattcgcttaaactgataaacgaatcccgaggcctgtaaccagtctgagactctgtgtgtgtgtggggcgggaggggaagcctcttccccactttcccaaagacggtaccaggagttcccccatgggtcgcccccaacatctaagccctccttagaggagatgcctcatagctcacgttcccgatgagcagtgtgtgccatgttcatgggcggcttggaaaagctcggactcctgctgtagggccagagaaggatacacacagcgagcctggcgaatctcaacagtactgggtgtggtcagagggcagcgtgggtgtggccgcatggctccaccccagacccacatggagcagtggctttggagccagacgcaggagctgggaatggcagccagcacatcacaacttctgagctcaaccatttgggaacaagctgtgtgcactgctgagaaggggctggaaccggcaggaagacggactccgtcccctgggatgggacacagcaaggcctctccagtgaggaacaagctctcggtagcgggtgctaccaggtcagcctgtgcactcaccatcggggacaatcagagacactgggagatggcgggacgggctgggtcacttctaagtccttctccaactcagaactgcacacctgatctgctcaggagacctcagcagtcaaagcttccaagccgcagaatgcggtggaaatgatccctatttccaattcagcaaactcgtttgaaaaagggcgtgaggatgttttcaaatttaattgtggacagccattttcaccctttgagccagaacatctactggggatggagggtataaaactgcaggccatggacacagagcggaaaataaacacaaagatccaatctggcttttacacagaagataccacatggtgttaccctaattctgacttcaaacccatctctgccaacttcaaaggaggctcttcatcaaaggcccttatttcacagtggctgtgaaacacaaagcttttggcccatataatccaaaccatacccccgcttaaatggaactatttctttttttaaggcagggtctggctctgtcgtccaggctggaatgcagtggtgtgacctcggctcacagcagcctccccttcccgggctcaagcaatcctccagcctcagcatcctgagtagctgggactacaggtacatgctaccatgcctggctaatctgtgtattttttgtagagacagagtcttgctatgttgcccagggtggttttgaactcctggcctcaagcaatccacctgccgcggcctcccaaagtgctgagattgcaggtgtgagctaccgtgtccggcctaaacaaactatttctgagatgactcccaaagaaaaattttcaactggaaccacacagataggagtctctgaggggtggtttgggtgtggacacagagaggggagacattcctcatgttaaacattgcaagacacccatcagtgacagccgttcctcgggccctagtgactcctcagagtgcagtggttcaggtcctccctcaaggatcactcccgtgagacatgtggcggtcagccttgggtaacaggcccttccggcagaactctgggcaacaggtccttccggcagagcttgcttgggagacactcttcttctgcctgaccagcaagaccacccttgggaatctagatctggtttgtcaggtactgttatttagagcctactgagcaaatccagagagccttacaataggcccacgtggaaactgcttggaacaggtgacagcgtgtggactccacagcatgctgggaaggctgccctcccgctcccaaggggcctagcatgcagcgcttccctgcctcaggacccactgacctcaagtgcacacacctcatcggcagcttcggaaggacttctccatgcagcagtgtcaggggatgctgcgggcactgcccccgtgcagtctgctgggaggctgaccccgttggtgccactgctggggactgtgggagggaaggagagtggggaatcacaggtgcttggcggccctcccacccccactcacatagctgaggggctgggccacgtctagtctagggcccctcccatggtaaagcccacagcacatgtctcctttttaaggaaggacctggtatctctacaaagagccaaaattcttggatttaaaaaaaaacaagagaaacaaacaaaaaagagaaacctgccgggcacagtggctcatgtctgtggtcccagtgctttgggaggctgaagcggggagaatgcttggggccaggagtttgagaccagcctgggcaacacagcaagtcctcgtttctaaaataagataaaacaaactggctgggtgtggtggtgcacacttgtggtcccagctacttgggaggctgaggtgggaggatcgcttgagcccaggagttcgaggctgcagtgagctatgattgcaccagtgcactccagtctgggtgacagagcaagaccccatctccaaaataaataaataaataaataaataaaatgacctttcaagtttttaaagataacctgtgaaaattgaggctgaaattctatctgcaaacacacagggataaatctcattcccaggagccggcctgcttttatgaagacagtgaatgaacaaagcaggtttcacccacacagtcacactcagccgagagctgtgaggaagctgtggagccgcctctcccttctccgttgccagggctcaggaggcttggggctggagacggctggggggtgatttaaaggatcatcttccctgatctctctgtatttctggtgcattcagcagtcacctctgtcgcaacactgctgtcccgggtgcgacttcgggaacgctctaccctgccgtctgggcctgggcgccagggctgctgtttcttaccagtctgggacagcgcctttggctgcggagcttgtaacactgccgggcgaagcacgctccgctgctgctccttgggcttctggcttggcagacctaggaacagaaggcggccttcccagtgcccgtggacccctgcctgcccccaggcgcttcagagactgacccctggcatcccatttcatgccccttgcaggctagactttgcagggaagcacttttttaaaaacttgaggtctttttttaacagctggccaggagatctggctactgttatttttacatgtgattacatgaaactcccagtgaccgacgcctgtgaattaatccagttagcacagtaacgtggcggggcgccggcagactcaacagtcaagtggagactgtgggaggagagcagtgcattcacaggcagctacctggaggctcaggactcggtgtggggtcacgtacaggcacattttgcacctgtttttcaaaacagccatgctgaggaagtccctctgccaaaggcagatgggacaaggacccttgcatgtgccctgccctgtgcagcatccccggcagcctcactagcagccggctcactagcagcgcgccgctggaatgcagccaccctgctaactggggcgaacactgtggtatgtgggggccagaacatgaaggacagacaggctgaaccaagtgcgctactgctgggcatggagcccgcccgatgcaccccgcctagcctgctcccgtgccaccactgcccacttttctgaacacacgacgctcacagtcaggggtcccaacctccctgctcagacagcctctctttaaaggaactttccagggctcgtgggtcaagttacaagtgatctttctagaaagcaggctgagcccgcggtgccctggtgtggcctagcagaggtctgaaaaacgtcagagagccaccccccgccccagggaggtagacgacctacctgcgctgggggcttggccgtggatcagcgttggtggcttcaaccggaagccactgctcctttcctctaaaagcacaagacaaaatatcaacagcaggcctgcctgggctggggctgggcctggggggcaagggcaggagaggactatggtcttggcctcagtgacttcgggcctggagaaccagggagaacatttccaaattacaacagaagtctcgtccgatcagcaggcctggaaggcgcctggaggaggggagagacaagggcaggaggaacgatggctcttgggccagctgctgaccatgggggcaggtggggcgtcagccgccctcccagctgtctatgacctgctgcaggctcaggagccgagctgctcagcggccctgtacctggctctggagaatgtcagggagccacggaacacaggcgctcaggccccacttccctttcctagaaggcttgtctgtcagaggatgcggctgtggccaggaagaaccttggcaccactacagatgtctgggaagtgagacaggtttttgtgatgaaaaggtcaaaggtggcacacagtgagcctgcctcccctttccagatgtgcctgcggagcttcccgtctcagtgagggggcactcctggccaccgtggaggaggccagctccccctgggccagagtccgggctgacaaattcacaaaactagagggaaaggtgaatgcccacgagctcctgggatggctcgagagcccagcctcgcccagccacctgtccacatggaccccttcatctgtgtgtcttggcaactgtgcccatacagggagtggggatggtggtctaatctgatccacaacaggaaggattgtcataaaaggcctgtgactcaggcaggcaagcctgttcctgggcaaggcacagagactgtggcattatggctcctggaggtagccctgcgtttgtgctaagcttcacccccttgtcaagctacaggacacaagatcaatatacaaaaatcgattgtgtttctaacactagcagtgaatgacccaaaagcaaaattaagaaaataattccatttacaataacaccaaaaggaataaaatacttgggaatacatttcacaagataaaactataaaacaatgttagggccgggtgcagtggctcatgcctgtaatcccagtgctttgggaggctgaggcaggaggactgcatgagcccaagagtttgagatcagcctgggcaacactgcaagaccctaactctacaaaaaattaaaaacttagccaggcatggtggtacatgcctgtagtcccagctactcaggaggcagaggtgggaagatcacttgagcctgggagcttgaggttacagttgagttacgactgtaccactgcactccagcctgggcgacagagtgagaccttgtctcaaacaaaacaaaaacattgttggaagaaattaaaggtgtaaatcaaaagaaaaacaccccctcatgctgtctgattgcatttctgtgaaatgccagactaagcagaaaggagctgagcggttaccagggctcaagggagggggttgggggcaggctgtgactaacagggatgaggtttctttttgggatgatggaaatgttctaaaattaatcacgtgatggtcgcacaactctgtggatgtactaaaaccactcaattgtacactaaaacgatgacaacaaaacccaaaacaccttgtcagcccaaattttcagactccaaatcaagattcagcaggccaaggaagacccctctcccgctgtgccccggaggcgccgctgtgcctgggcagcaagaggattgcagcaacccttcttactataatagttgtatgagggagtccagccccaggggcttctggcagcctgtgttagcagagctggtgcctctcccgtaacagactggtcataaaaaaacaaactcaggagagccagatcctgcaggatgcgggggtgagccgccagatgttccttttccgaaggaaacactcaattacatttccaaagcacggagctatgcagaagacgactggcaatttagatacatttttaaaaggtcaaattcacaatttagatagtttttagcaagctcttcaagctggctctccacgctgatgttttggtcacagactgactactgcccttccacactccgctccgtgcagcgctggcgctaacgctgaggggagcctgggggctggcccgagctgccaagcggaagcaggagacttggataatccctgccaccgacctgccactagtgctaggcccagagcgtggccctctccagagctgcagacagacaaggcgtgctccaggggtagccaaaatctggaggtccctgtcacaggccctgctccacgaaaacaagggtggtctcttctcattccttccagaaattttcttctgcaacacaggtcgcaacacaagctgctgaatcatggccagagcccgacgcctgccacatacccaaagggtgtgggcctgtagaggatgctgcaccagtctctgagggatgcgcatcactccagagaggaagaggacccctcccgccggcagcctttgccctcctgggaagctggcaggctccctgtctgagggtgcttttcgcctgcctcagagagccccaagtgatgtctgtgggaagccatgcttgccccccagggagccccgatttaaccagggaagggatgggaatgagactgtgtgcatcaaatgctgagaaggcagcctggctggagctggggtctgtgcgtggacggcgctggtgcagggtggggaggaggctcagccatgcggtgggcagggagtgatgcctgatgcacagaggacagagggtgccggtttcttagtgccagaagagggaggaatataccaagggaggcacccacgtgcccctggcgtcatctccacatgcaggcaggcaggcagaaagtaagagatcatgtggacaaaggtgtgtccccagctctgtccgtcatctccacatgcaggcaggcaggcaggcagagagtaagagatcatgtggacaaaggtgtgtccccagctctgtccgcggagggccgggagcagggctacacctgagtcagtgagatcgcagtaccgcacggagtgatttcagaccttggtttctaaagaccatgttccctgaagaaccagcgtgcctctgagaaatgcagattccaggactgggatgagaaaagaggctgagccgggaggctcttgttgtgacaaagtaagggcagtgctcaaatgaacaacggggacctgcctgacagggcttccactggccaaatctgggacaacctgaacattaaataaaaaccagtaaccatagacggtcacccactgatgccaacagaagctcgcctgtctatgttgacacaatcgatcaaggaacaagcacgtggggagaagggcaagctcctccttccagtgaacaccactaatcaacgcggcagggatggtgctcagagtatcccacgggtggtgagtgcctgtaatcccagctacttgagaggctgaggcttgagaatctcttgagctcaggaggcagagggtgcagtgagccaagattgtgccactgcactccagcctgggcaacagagcaagactctgtctccaaaaaaaaaaaaaaaaaaaaaaaaaaaaggaagaaaatcccatggggcagtcgtcagcgggaaacatcactctaaagacatcactgggcgcgaacactggagggcaggagtgtgatgaggtacacacagtcccagagtctaaagtgtctctcagaaaccatccagcacaaaggggaaagtagctttacagtggtgaaacctggcagacagcaccctgatcgaggagcacggccaccccgtgctggtaaggggacaagtgagtactgtgcatggcttctgtgacattctcatccaagatgccacacctgggtctcaccaccaggacatactggacaggccccaactgagacacttctacccaacagctgacctgtaatcctcaaggtcatgaaagtcaagggaagcctgaagacctgttcccgataaaagtggaggtatgtgtggtaggaccagggtctcagtccttttttctaatggactcatggagctgactggagaaagctaaatggggtcttcagacaaaagggacagagaaattcttctgtaagtgttaaagcttttcaaaattaaagctaaaaaacagaaggcaggcagacaaggatgtgaagttgggtttgcagaactgatgtgtggctgatatgactgccttttcatgcgtgagggcactggggctttaaaccatgccgcgtcggggcctgcgaaacagctgccctgctcgaggctggaggggaaaggtctgtggggagagagacaggagggaggccgttgctcacagacctcagaagcgatcatgagatttgtaacagagctcagcagcacaaatgggtccagacacacggctttagtaactgatcacctaaagcagaacctgcctcaccgtggcaggctctgtgcccccatccagaccaccacctgctaagcgacaccccaggaataaccaacatcgtgcccttcctgaggaccctgaaacaccaagcccctctgcaggatgagaccaggtggtcggctcaaaacagtttgcttttagagtcaaaatgccttgttgaaacggggccatcaactcaatgctgagagttataagaacccacctcttcccttgacacggacatcacgccagcagctaacttatctcacaatgcttttgaagtcggcaatgaatttatatatggtaggttgggttacagaattcaggttgttaaactcgcttgttaaatcttttatgaggaatttcagccacgtgggagaaactttcaggaaaccttggagttggttctccagtgaaagaccaaaaaggcaggctccatattcttcagaaagggggagcggctttccttaaaattttaaagctgggggccagacgtggtggctcacgcctgtaatcctagcactttgggaggctgaggcgggaagctcgcttgaggtcaggagttcgagaccagcctggccaacacggtgaaaccctcgtctctactaaaaatacaaaacattagctgggcatggtggcacatgcctgtaatcccagctacttgggaggctgaggcaggagaattgcttgaacccaggaggcagaggttgcagtgagccaagatcgccccattgcactccagcctgggggacaagagtgaaactccgtctccaaaacacacaaaaagttttgaagctgtgattaaacatatttatctaggtaggtctgagcaaaattaatgtgagaatgcacaaaaaagaggtctagaaattcaccaacttcacaggcgttacctttgggatggcagggtgagtggggaaggggcagggattctttttagttgaaatatttctgatttactttaaagaaaaaacaattatgggccaggtgcggtggctcatgcctgtaattccagtactttgggaggccgagacaggtgcatcacctgaggtcaggagttggagaccagcctggccaacaggtgaaaccctgtctctactaaaaaaatacaaaattaccccggcattgtggtgtgcgcctgtaatcccagctactcgggaagctgaggcagcagaatcacttgaacccgggaggcggaggttgcagtgagttgagatcacaccactgcactccagcctgggcaaaaagagtgaaagtctgtctaaaaaaccaaaaaaccccaattatgaatgcattacttgtataaaattttgaaaaatgagtgatacatttcttcacaggttgtttttagaggacttagagctccatgcaaccaggccctgcttgcagaaacaaacatgagggcttatgaagcctcatctcacgccagatccccagactatgagctgaagagttgggggaaaaattttaacagctgaagaagaactgactttaaatgcccgctgaagatctgattttcccacaccaattgcttttcctcccaggagaacccccaggccgggcgggaaggcagaggggccggggctcacttggctctgagtcggaattgcctgcagatggctcgcagaagcttgatggcataaaaacattgttttttgaaactgttgacaaggaggtgcaggcgggggagggaacaagaggaaaaacagcatgaatgggtggggtggacgctcagagatcacctctcccacctgaggggtggattctcacgtcccacgggaggagacggaacagcacgcaaacagggcattcagtctttcccgagaacagcaaaccccaagactctttacagcactacgagggtctccagcccgacggccttgatctgtctgatgactacagtcaactctggtcaactgggggcacccccttgtccctgcacctctgcaggggcagccggcaggggagatatcagatgctccaggccacattggaggccctgactcctcctcacctgtcaaggcttgtccatggggttccccctcccccacctaagatcttccttcaccagggcaactgcttcccagggtgtgggccagccaacaggtttccacaaatgaagtggaattcgtaggggaagaactcactctacgcagaatggaaccaaagacaacactgttcaaattattggtgcccctcacgcctccagttaccctggagagctgagtgtctcttgggggctgctgcgctggacgggaggtgatttgaagagggccggggagaagaatggtggtccctcgcctctttagcctacattcacagcccaaacacctcctcttctctatgctggttttcgatacagcaagcatggttcagcagtgggcagtgagggggaaggaataaaatcaacgagcaggaagtggagctccctcattccacagaacacctatccacaggtgcaaagatccttaaattaaaaggatgccaactgcagcctggactgcaagccatctggacagttccgcaatatccagtcagcagatgacagtgtaatagcactggaaaacctaatgcagctgtgcaaaaagacgcggccatgtccaaaaccaacgtgatgggaaaagggcatgaaaacaagggtgtggaggggtgacttgggaaggaccctggcttcctacgctgtgtgttcctgtaacgcatgcgtgacttctgtaagcagaaacaacttgacatcctgaaggttcaggactgtaaaatgatttacatgaactttccaggaatggatttcagttgggtaaccagagaacctgtctaaacactcatgtatgtccaagttggcactacagacagctaagacagaggccacgagacaatgccagagtgggaagtcaagacggggacgagagaatagccctgcagtggcatttaccctcaaatctgcagagttgtgcccatggcaggaggccgggctttctgagtgttatattaagtagtgctgacggcattatctgcctcaggaacctctctcctgtaccagcctgcatgagtccccaggccgacctccaggcctgtgctcagaccaggcctcacgtccagggccttcaagccctttagcctgccctgctccacagtccgagcctggcccacccttccaggcccccgcaagctcctctcctctgggagttcacagcatcacacacgggcctctgctggggcctcctggcttgctggttaccgtgtgtgtgtgcatgcttgtgtgtacatgcgtgtgtgtgtctgggctactgcactggactgcccgtgctgggcatgcagctgaggggttgggagaacaccccacccctaaacccccagtctgtgtccagccttggaaagaggagatgtaattaacaggcagaggccccaacagggctctcagtagtcaacccctttcctccatttcagagggacgatctcttcacagtcttcctcaggccaccaagtctcaccatgccgtcagtgtcactgattcgagacgaggacccctgatgctgcactctggacaagctctcacctcactcctgacagagcccgagcctcagatcgactctaaccggagctgggcaggaaggacacagcagacggatgcgcggcactgaggggaatggcgggtttgtaagcataaacgctttcaccattccgtaagtttgcatattttacctgactgtgagggtgggaactgggttaaagaggatgttctttctcgcttgacaggagggcagtaatttccatcttctctgtcagaatctacagaaaatgatgagaagaggaggagaaaaatcaggttgcttctgtctttaaaactgaagatggtcaaaggtgttagagagctccttaccttctccgccttcaggactggagccgccagctgacctctgaaacaaggagcacacagccggggtcagagggcatcaggctcacggcagccgagcaactctcggggccgtaacaaatatcccaacatgcaccacgggcagctagttcccagagcccagcacccgaatgagagccaggattttagcctaaagctcaaacatccccccgatgaacctctgcacccagcttcacaaacacatgccaaggaatcctctcagtggctgggaaagcatccgcagcacccagatcagtttcttgtttctccacaggttacgctaactggcctgccacccctaaactcaaacacagccgaacctcatctggcccccgttcattctgccaagagctgaaaagcgaccctctccacccttgagggcagcggacttgtgtaaaatggtcacatcacaccggataggagcgatttcccttccttgccctggaacattctaccatgcacatgcttgtctcagggtcggctgttattcccagagcaagcaagagcttggatgttttggaccaaagcccacttgcgaagtgtttagaacagaaccatcaaagacaaagcccagtcacaggctgagggaaggctcctgaagaattccctattccacaaactttagctttagagtgtgaacaaccagcaaccaagacttaaaatgggctcatgaccagcctgaccaacatggtgaaaccctgtctccactaaaaatacaaaaaaaagtagctgggcgtggtggtgcacgcctgtaatctcagctacaggctgaggcacaagaatcgcttgagcccggtaggcgg[136 bp omitted]gcactttgggaagctgaggcagaaggatcgcttgagcccaggagtttgagaccagcctgggaaacatggtgagactctgtctttataaaaaacccaaccacataaaaatcagctgggcaggggggtgaatgcctgtagccccagctcccagggaggctgaggcaggaggatcacctgagcccggggtctgaggctgcagtgagctatgaccatgccactgcaccccagcctgaaggacacatctcatctcaaaacacaaacaaactcaaaacttaacatgaggagtgtttatcctctcccccaacacaatccctcatttatgtcctgtctcagaatttagcagcccaaagcgcaccgatgagtgagggccgctcctcctggcgcgctccctgcaagagcaagcagaaaagccaattttcttattttctaaaatgctcctcagaggtcaagtttagccaaatgaggcccgcctgcctcgacgagctgctggggcttaggggaggtgatgcatgtgaaagtgctttgcaaactgcagagtggcctgggaaagcaaactgcaataaataaaactgaggagcacaggagccaaggcagacccccctcaagtcagggcgatgcattttcccataaagggccagactgtcggtactgctggctttgtgggccacatttggtctctgtcatatattcttgtttttgcttttataatcctttaaaaatgtaaacatcatcttagcttacaggcccaggcctggagcttgtggcagtgagagcccagagaaggtaggaagttgacttgaagtcacatagctcgttcacgacggtcagaaaaaaagctaccctggactttctcctcccgtgtgagctgacaacatgggtttgtgtgggaaaagcaagcctgggcttcttgcttgaggcccgtgttctgagggggctttggaaatgctcccaagggactgtacgagtgagggctgattatcactatccccacgagatgacatcatcaaagtgtgtgggaaacacaaaatccttgtaacacaacagtgggttctattagtcactggggcaattgtgaaaataccactgagtccaaaacgcaatgccatcaagcagccaggccctagagtcagtaccaactccggccaggccaaaagcacgaggggtgcagaggctgcctggtccctgctgcctcttgaaggccggaagaactcagtgtattccggctctgccattttctacgggtgaaaccttaccttgcccagccttcggtctcctcacctggaaaacagggatgcgtgaggtgacaggcagggcaggtaaggtgctcagcccagtgccctgcacgctgggagcagatgattataatgctcgtgacccacacctgatgagatcaaactcccaaccgatgtaaaatctggaggctacgctgggggcagggctttagagctcaaggcaggcatgaatagggagtcaggggtgtggagtgagtcctgggtgcagccaggaggcgagggacctggactgggaacctttctagaaatgccagagcctggggttgcatctgatagtgctgagctgtcaccaccttgtcatcccttttcttgggtgacatctgtggggtgggtacaggctccagctatcgcttgccctcatacttagcaaaggtgacagaagtacagagaagcagcatctgcccacccgggcagccaaaacctttgctcatccagccaagcctgggcatctcatgcctggggcagctactgccctcgacgggcccttacatcagcctcccagcacaggcagctgtgagaaacaacacctgacacagcctccttgccctctgggtaacccatgccctccagagccctgtaggctggctttggcctccaaatgctctgtgcaggtcactgtctgaggccagcagcctctgcacagcccgatctcctcggacaccgcactgctcgcctcacctctggcttccctggcctcaccagtcctcccatccattcctaacagcaggcccaggacatccccacccccaagtcccatcctgtggctctagacttttctctccccttttaatccaacgagcctttcaactgtaccaaaacccttacacggtgtcctccctggtcctgggggatctgtcccttcctaaatgacttctgggaccaggagatggccataccctctctggcctctgtagacgacctgctctctcatccagtgacgccctccttttccctcaagcgagaatgaaccccttggtgaggtgacctccaggccccttatactctttctctgtggcttattctgatcctgggagttgtgtcagggactccactagacttaggaaggaactggacctcacagtagaagcccgtttagcatttgttcaacaaaagacactgcatcccaggccccttgcaggccacggagaagccgaagacctgagtccggccttacagaaggaactggtccccgagctccctcgtgtctcctcacccctgcacgggatgtttctcctgacatctccacacctaactctctggctcagtggttatctaggttaatttccacatgtgtcaatttcctagtttccgtttttgatttccaattttatctccttgtggttggagcacatactccatattttgatcctttaaaatttgagatgtgtttggtgacctaacaaatggccccccatggagaattttccatgtgcacttgagaaggctgtgtaccccactgtttgggtggggtgacctatatgtctgttaggtctgcttggtttttgtgttgctgaagtcctgtttccttactgatcttgtctagatgttctatccattactcaaagtgtggtaccgaagcctccaactcttacggttgactcgactatttctcccttcagttctgtccgtttttgctttgcgtattttgggggctcttttgacgatacccatgcctctcagggatcatggatgccatggatgctctccccagagcagcatgtccaggtcaagagtgtggctccggggctcccaacagtctcttggggtctactcgtggctctagaagcagccccgggaacactgtggtgcccccaggcattctgcactcatcctccccttcacccaccacctccaacctgccagcaagtcccattagctctagccccccgagaacgtacctttccctcctgcctcggtggcctcctcaggcacagggtcccctctgccaccaggctctggccatgtggcctcctgttttctgaacatgttggctgctcctgcctcactgagtgttgctcctccgtgggcgccctccctccaggtccctgcgtgtctgagatgctgtgagcaccacctctagggtaagttcatgctcactccctatcccagcccctctcgggagctaccctgttttgttctatcacatagggaaatgatctcagaggtgtctcctacaacacagttcattcacgcgacacccgggacacctgcacagaaggcacttgctgaggacttgctgcgtgggtggagtccgtgtcctccaccatgtccccttcagtgaccttgagaagaatgggtgcctaggcagacaagattcagatgctgcctgacccctgatctcaggagaccctcaaatccgtgccccaaatatcttctaagagcctgcctgcaacaaagtggggggcctcttggtcctggaaaggctgggaagccaaggcttgggaagaacaacacaggaagattcgacaggggaacctcctgccagcaactctccactaagacccagcggagggaagcaagaagacagaacgcgtgcctgtggacagagctcttctagaatcctaacccgctggccacgtgaggtgccgcctgccctctgccccaatccaggcctccacaccctgcaccttgctgggatggagggcctctcctctcaggagacgttggaacttgctgtccagctggcttgtgctgccttctccaaagcaggaaatggtttggggtgaaggaacctttaagccacccagccctgcacacagccaatgccagctccacattttccatttcctagactcagcagcccaggagtctggacctgtttggtgtcaaggcagtctggggccacccctcaccccaaacaaggcagtgggtcctcaggggttggtcccgaacaatgcctgggacacactcagggtcagcccccagaggtctgcaaccagagctcaggaggattttaagagcaagctccaggccgggcacggtggctcatgcctgtaatcccagcactttgggaggcctgggcgggtggatcacctgaggtcaggggttcgagaccagcctggccaacatggagaaaccccgtctctactaaaaatacaaaaattagccaggcatggtggtgcatgcctgtaatcccagctactcgggaggctgagtcaggagaatcgcttgaacccaggaggtggagcttgcagtgagcccagatggcgccactgctcttcagcctgggcaacagagggagactctgtctcaaaaaaaaaaaaaaagaaagaaaagaaaagaaaaaagaaagaaacaaaaacaaaaagagcaagctccgaagactcgagcttagtggggaggagcgaggacagaagcaggacataagagccccatttcctcctcctcctccacttttcccaaactagactctactgctgcgaggcgcagggcttcaggatgacaccggggaatgctgggtcagcatccatttcaacaccatgatgacaacatcccagagtaataataaggaagcagaagagaaagaagaccagagggccctttgacttgtctctctggcactgggacagcaggagtgaacagagcaggctcagaaaagatgaagcagccctcccgcggcttgggctgcaggctggtcgggagcgagcactgtgagtgctgatcatgtgccccacgtccctgccggcggggtgggggctggtggcgcaacaagctccccaccggcagccatagggagcttgtgggaagtaactcaattctgtgaggcgcatgagtccctgtcactaaatacaagacagaggggcacatcccatctggaatgggaatgcaggggtgggaagcttgttctttgcctaaggaatgaaacagtgaaaatcatggttgtcacatttattaagaattgccctgtccaaaaaacatgggtcttgtcagactgtctggtgtgtcctcggtgccaaggcggcccagggaaagggacaaagctttcagaagccgactccacagacacaaagacgaacaaggaagaagcaggaaggaatggcactgtttacctggtcccctaggaaag[142 bp omitted]aaaccctgtcactaccaaaaataca[201 bp omitted]caagcggtgtaccagggcctcagtgagtctggcaagttagaaaacctggctggtcatggctggatacctgggatacaaaataaatgatgggccagttcaatgctttttattctgtggcagaggcaaccagctcagaaattcttgtcaaaagggcaggccctgagaaaagcaagtgagaggtggcttccaaagttgaggggtgctgagggtcaaatcctgtgcaggggctggaaggtggggggaagctgtctggccagagggattcattccagaacctccttaagctccctggtgggtctaataaacatatctgaagctcggcaggtccttggcagggagcttcagtccagtacaattccaccaggctcgcagtgagtgcccagagctgcctgctttctccacatcaaacagagaacttaatcgggatgtggtttggtcttcttcagactgtcttctgaaagccaggaagtctgatatatagagactttttcctggtactgactcttccatggccagggttctgacgagactaaaagatggtaagggccctttacaagtaacaattcagcgcaccactgtttatcatcaagaactctcagctttatattccccccagggaccatggaataaagtgaacagactagatgtgacggatgagacctgccgggtaacatgggggtggtttcctgaacaccagtgtgatacagagtgagacccaaatttcttctgatgcaaacgaaaacggtctgagttcacacacacgaaaaaggctcaggccaagaagcagttggcatcgggttccatctgacttgatctatggcctaactaacctaaaataaagtttactttgctctgagcaggcccgattagtagagaaagccaattaacaggagcccttagcaaccagtcagggtgttctctgcagacagcctgagggaagagccctggtcagctcagagctgtcacaaggggcttgacaatggctctcctggggctcctgaaagtgggtgtccaaaagttacgagtgctaaaactacaaggtgcatgttatgcacatggccaccagagctacattggaacatttacatactgctctatgcagcctccaatcctggctctcccacggtgcccacaagctcatcccaaggctccctgccatacagcttcaccttccacctgccagtgtgggggactgcttgaatttctcaggatcagagcctcagacccaaagtccatgagaatcaggatgctgagatctacctgggctggccaggccaaagagatgaacatgtggacgaggtgaggcccctccagacactccaacatgggcctctgtgagaagtacgcagggcacagaacagcgcgtgtgctcttgaagagcacctgctgtcacaaaaactctgtgatgcacttgtttgctactctcattctagaacctgtcacctctgcagctggagagtcctatgtgggctgcatttttcaaacccaggcacctgcagaaggcctctgggggggaccctaaagaccatctgttcccagacagctgaagacggaaacctgagaacaccatttcctgtgctctcaaagaccagaggtgcagtaactcaccatacctgactcaggagaagtttccggcagccactctgccaacaaaagaaggacgcagccacctcctaattcttgctctggcggcagtcacgtgcgctcatgggagggctgtactcccagtgcactgtgggtcaagtgcctcctggctggactccttcccgcggctcccgtgtctcactaccccaaacccacttttgtgccacgaaggccactactgccgttacctcccccacacccatagcctatggcacaagtaaagactgttgcttctttttccatcacacactgactcctccaaaatgttaacacaggactccaacccacccctggctgaacagtgcttcctaagtgtcctgaggtttggtggctgtagctgaatgttaacagtttccttaaaaaccggggactgttgtgtgctagaaagaacgctgaggtccgggataaggtttgggaccgtaccagcctggaaggctgcctggtgctcaggcggtagagctgggtcccttcttttcttgttaagagtcctttttccctgtcctgagaataggggtcttctgtcatgagttacctacaggatggagttttcaatcctgaatgtaggataatgtttacctttcccaatttatcaaacttcaaaaacccaagacatttcttgttcttgagagttcacaatcttctccacctataatcttcaaaaggcttcttaatacaaagataaagggctcaggggattccttctgggttcaaaggaagagtcttttcttcttcctgctttgattgaagacaatcagttcactgccttaaccacagtccaaacacaatcagtcttgcaaagcaatctgtgttggagagtgcctcttcctagatatcaaaggaagccttagcttcttgggtttctaagacgctaaacttgaatgcccgcattcagggaaacaagaaggaaaaatggaaggagggtgaaggggtcaaattaggtttggaaggttctacttcacatgactcaattcctcctgacccctcgtgtcttttttgggaaacaggattcacctcttgctgtgggtatatattcccacggcaatttagaaaaggctaaaaggggattcgatcttccctgacttttcagcagcatgaattaaagcgagctggaagaaatccttgtcatcttttaagttaccattagctgcttacaattagctagggccaggatctgagggacccgaagggaaagtggctggtctgggttgggctccccctgggcggtaggagtgccgggtaggtgtggacttacccctgccagttctcgcggaaaaggaggaagctgggcttcaggagcgggaggcggaggagtgctggctgaggcgccagcaggggcaggaggttctagggcatgctcgccagctgactcggggtgacccgtgccatggtggggggcctcagcctccccccgaggctcctctcccgaatccgacaagtttttttgctctgcaggggactgggagcaaaaaagacaattttccttcaatgtgaataaaggctgcatcacacagcaggaagggcgggcaggggtcagaggctggagctggctcagcttgcagcagctcctgcgcctgggaggaagatggggagagcaggcacctgcttctgggttctgctcaacaaaaccggctctccggctgacggaagggaagtgagagtggactaggtgccatgtgactttgcagggagctctacagtgtatgagaagcaggaccctcgtttccaaaactatgggctgcctggcaaggagctacttggcttacgggccttggtgatcaagggacagggacgatcatgcaaaatattaaaaccccttcaggatctcaaaaatactgaagtgggggagctggccatcagcaccatttctgtgctttaggaaagagggaggtggctggaaccccaaagttagggagaaaccagggaggccagggtcaagggcttctgcctctcgccggggtcaagggcttctgcctctcactacagttcttctagcactttccatttgttctgcttacacccaggatccagaaagtgctttcccacctcggtgagtgcaagtgtggggtgacatggacactgagagctggtttttgcatcagtggcaggcgggtagttcagatgaaggaggggggcaaatccacagagcccctcagcctaggattctcccaggtgcatcctcaacaccccaggcaagggctcatttggaaagctgccaaggtgagagcagccggttccagaagtcttcctccccacagtacaacacccagcatcctttaaggtggttcctgggactccagcagggcttccatgggctgagagctctgtggccgtaactccaagacttttcttgagaaatgggttaaacacctggtgtcctaaaacagactccagtccccaaacctccctcttggcatcgtccaacgacatggagccatttctcgcactcggtgacctacatgactacagggctgccccgtctccccgtggacgtggctgtgcttcttcttgggtgtgaagtggctgacctctttagacggggtttgggcactacttaaaaagcagtgatccgggaggaggaaaggagctacagaaagaggatgtaagagaatgtacacaaattcctaggaaagcaaaagcaatcttcactcaaaagtaatcaaggggacactgtcgcctcttcgtatccagggcagagccacggaccagccgctctctaaacctggctctctaaacctgcacagggcaccgtggttcgtccagccacccatgtctgttgctacttgatggtgagagacttaacacctcacaagagaaaaattaaacccagagctctgtgggggactgcctatctctaattagaaccacttgaattttttgtaatccctgcttttgaaatgtaaatattcaaacatcctcatggtaattcaaaatgctaaacaggaggaccaagaagtaagtcataaacatggaaaccaagacatcaaaacaggatcaaattcgtcatctttggttaagatgaatgatttgtataagtgttgagaagtattacatcacttcctctctcagatgggagaattaacaatgtcattccagcattttctactcaggtcctagcatttctcctgggcaggaatcgtaagctctaaagaactaaggtgaagcctggagtttttcaacatgtctggtaaaatcagacatcaagagtttgccagcctttgacctcatcctaaaatacacatggctggcaaaaaccacgtgcaccagggctaagctcatcacaccaacggtaagcctcaaaagcaggtctaaacaccctacgaccacattttcagtgatactgtactttctgctaaatagcatttctgtaactgccttctttttaccaaatggccattattctgctagtacaacctcaaagcctccccacttcagattaacaaatgctctggagagagagcaactgaaagaaatgtttagtctttacaaagaatggaacagcctacataaggatatttaaattctcttcacattaaaaagaaaaagaaagaactctatctccatccaaggcagttaagaaagaaaggtttcatttttgccccggaaacaatggtgcatgtaaacgcaggcgtttcgatgagacagcacgcccctccccaggaagcgcaggcatgggaagggagtaacatccctgtgctgccaatctgaccatggcttcgttttaggccctaggactacaattaaaaccacacatggctttttctatcctggaacgataggatttggcaacctcacccaaggctaagtgatgccaccggcacccacacgcaggccacggtcccaatccgtagtgtgctgaagtgcaatctgacacatcaacgggacccacagaaaaccgctgtgtggctttgccactgaacaaaaacaaaaaattcctcggctggcagcttcatgtctttcttttcaactccaaatcatgctgaatcatgattcagcaataaaacctgagcataaagagctgtctcctttgaatggcgtgagagggatggtggagacgaaggggctcttttacttgcaccccatcgggtgtggtctgagatctcgtttactgaaaggtaagtcagctggtcccacagttgatgagacttcttgatctttgaggatcaagaagttgttaaagtcactataagtgacatctgaggggcaattaggacaatttaaaacatggactatatactggaggatattactgaattaacattttcgtaggagtaacatggtggtaaggccatgcaggagaatggcctcatccctatgagacacccgtggaagaatttagggcagaaatgtcacatgggcttaacttccggtatgagaggtgagggcagcaatgctaacagagagggcaggggcaggatacccaagtgtttgcagtgtcactcttttccaaggatttgaaaattttcagaataaaatgttgaagcaaaaagggtggggcggggggaacctcctcggaaaaacaatggcagcagctctaaaagctcggtcccagctcggcttctggagagcaagacagggatgggttgatggcctccgcaagagagaatgaaaccataaaggctctcaaaccctcacttctgacacacactgcagctgctccctgcaggccctgaaccagaaagccaaggagaaacaaagccagccgcccgccctgtgtgtttactttccacctcactccccagtggcagaaaggactctagggccatgtggacactgtcctccgacagcgaagcaaacacgctcctcctgctcctggcctcagcacagaggtttcccacatgcctcttcagcgacggtgccacagaagtgcgagtgacagaagtgggcagcccaactcccaaggctggagggcagttatttttagaagtccatttagaattggctgtgagccaatattttgataagaactatacttggcattttatttttaatttttatttttaattttttttgagatggagtctcactctgtcgcccaggctggagtgcagtggtgcgatctcagctcactgtaacctccagtcccgggttcaagcgattctcctgcctcagcctcctgagtagctgggattacaggcatctgccaccacagtagagatggggt[131 bp omitted]ctagccttctggttcaactccaacatgtttatgtaattggcatagaccccttgaaggtcatacatgcaaattagcctgcaaatcacaaagcaacaaaaccccctcagctgtgaaaacagtactgacacagcagctagtgactttaaaagcactttaaattcatctgagcaaatattacacattactgttccatcttgctggttgccttaaagtcttcagatttaaagaattactgattcctattgtttgttttaaaccaggggttggcaaactgttttctgcaaagggtcagatactaaatatcttaaggctctgcaagccacacggtctctgtccaaatactactgctgtagcagccacaggcaaccgcaaaggggatagttgtggctctgttcttgttggctcatgcccacaatcccagcactttgggaggctgaggcaggagaaatgattaaagccataagttcgagaccagcttgggcaacacagcaagacaccatctctaaaaaaaatttttttttttcaaattagccaggtgtggtggtggtgcctgtagtcccagctactcagaaggctgaggcgggagattgcttgaagccaggagttcaagactgcagtgaattatgatcacgatcctgcactccagcctaggccaaagagtgaggctccgtctctcaaagataaaaacataaacaaataaaacaacagcaaaaaacaaaacaaaaaaacacaggtggcagtgctgtgccttaatttgctaacctttgttttaaactaaaaatggttcaaaagataataaaatgcaaaattctagaaaatcctgattttactgaacacctgaggaatgactataacatctccaacatagctctaacacacccaactcctgaggcttcactattctctaaaactagagaaatgcaccagtcctttcgtactgatggaacctccaaaagacaaatcataaagccacgtcattaagctgtacttgtcagggcccaagggagaggagatagcagaggcagatttatcttggaaatacctggagaaccaaaacaaaactagaagaaagttttcatgtttctggattgcttcttcagcaaaaaaagtaacaatgggaaagtttcatgagttaaagttacaagcttagtagataagtccaggctaacacacaggtatcctgggaggggtgtgctgggggaggtttagaacaaccattttcccctcctccccaacccctacaaacacacacacccgatccccacagagcacttcaacattgctcaggaaaaccgggccacatcaagataaatgctggctttgggacaggacctaagaccagcagctgagtcccagatcatgagagcggcttccagcctgggagccggtcacctgtgaggggacagaagccacaggagaatggagttgatgagattctcaaatcctgttattaccaacaagatgcagacatcctcaaaatgcaccgaattcagcacaacacttggtcactctaaaatgttgcagcgggtatgaggtggggagtgccgccgctgggcatcagtgggactgctgcagcgggtatgaggtggggagtgccgccgctgggcatcagtgggactgttgcagcgggtatgaggtggggagtgccgtcgctgggcatcagtggggagggaccacacattatttctggataaacagtgagggtccccatgcaagctgaggagtcactgccacacagcaccaactaacttctgacaaaactctgaccatccacaccgatctgtcagggagagaagccgatggcttcaaggtaaatagcacccatcgttgtcttatcacagaaccctgttgccacaccaatcagaccttccacaggctgccagctcatcgccatgaatcaggcgaggtacttccaaccacactgcgacccagacaccctgaatccaagggagaagcagcctcatggacacgggataaatatataatgcaaacaaatgaacaattactctaaatgcacgtacgcccagctcgttagggccaataaatccaggcttaaaggtcttgtttcccctgtaaccaccattgctctcctccttcccctccctccctccctccctgactccctccccaccttccctcctccctttgccccctactgtccctctgctgttggttttcctaaggtacagtggcatttctcaaacaaatcatcaggaattaggaagaagctttctaataccgtttcaacaaactgtactctctgagccctttccacaacagacccatcctaacctctctccacggtaacctaaagccaccaagccttttccctccaagctcaacgtgaaagtgtaaaggcctctgcttaggtctccccgtctgtgggcagaagtggccttggcaatgcgacctggaaaagagactctcagtaaagagagaacaaattagagtaacgaagtgaagagagaacgtaccggccccttaccttttgtcctttatccttctgaaacacaaagacgggcggagcaatggcaggcttttctgcaaaaagaaaaattagtttttttccccccaacactatatgcatacagtaaacaaagctacacttgtttgtaatatgttaaacatatatataaatgaaactagtaactccagagaacatcaaatcacttagaacagcgtcttgactcggatgcctggaggcacaggtgtgctgggtttgtgaaatgcacccagaatgatgtgacgtgtgccctctgctgtatgcatttatcatcaataaggagttttcaagactcactgagagcgggcgtgtaaatgggagtgggagagcagcggagagtgtggcagcgctatttggcgccatgaactgtgaccttgcaggaatgtggcacctcctgaattgcaaatgttagagactaatttagctttttaaagtttacaggccagagggcaaaaaaaagggccaccgctcgcgctgtttgcagacagttctggtagaagaatcctaacgctcaacctggatctctaagtgagtgctggttgggaggaaaggatgtctggagttgctagaggcctgagagtccatcttgcacagcggctgaaggaagaaacactctggggtgttctgtcacttgatgggacaagagcaaggcggcctgtaatgcccacgcaacaccatctgtctcctacccaggggcagccagatccacagccctgtgccactcagccccggagtgggtggcagcccaggaggccctgctgcccgcacaggaagcacagatgaggactgcctcgaccccacgaggaggcgcagaccacacctgcctcatggccttgggcctgcatgcactttgatgaactctgggggtgctcccagggcctctttcaccattcagggcactgagggcctagcgtggaggccaagcaagagcagctgtgactctggtgaatgcctgctgtgggctgcgggctgcgcactggtgcctccgcgttgagcagggtttgggaagagccctgccttcgcaggccccccgaccccggtcgtggggagccaggcattacccaggaagcatgtgctgcccatgatcacgacgaaggcactctgcttgggcattgacctggtctgctctggagtccaggggaggtccctgagaagagggggctgtgctggggtctcaagaagagctggaagggagagcagcagcagcttgaagtcacagcttgcggggtgatggggccaggggcaggcggtgggcatgctgacttgctggggaaatgtcataaaaggcaaggggatgcctggggttggtttaggttgaaagcaaacagtttggggaagggagtgagagtggctgtggggagaccaggtgggtagtgactgaggtggagagaaagggacagcaccaagatgaccaaacagacaccatcccactcctgcagacgcaggacagactctggtcttgaccttggggcatcagtccacagccaggcagcccactgatggtgacattccccccaccatgctccccgaagcctcggcacaccagggtctgattcaccgtgtacagccaaggcaaacactggagtgagtggcgtgcgcgagacccaggggctacaagggagcaggggaggtcagaggggtctccaaccagacttccaggtttccctaagcagacttcttgccaacacagcacacaggtgctgcttgacaaacgtgaatgaatgcacctatgccaggcaataaatgatgtcaaaggaatgctgggggactctgggacagagcagcagcgtatccacaccatgtgtgccaccaggatcctagaggtcttccggtgccacgcctgtaccccacaagcccagccctgacctctgcatttgcctccctgccagctgccaggtgacaagatgcacaggaaggagccagggtttgagccagcttggcactctccaaccccattttctttagggagctacccacccctcgtccccctgtcccccagttcagatggagccaagctcagccccagctccaggcctgacaagaagagtcccgcatgcatcgtctaacacatggcacatgaacaaggccaggcctttcgctggagatcctggggctgctgagctgctggtgaatgaccctgaggctgccagcaatcccatgtcaccgagaggggccttggaccagagccaaccagaggtagcagagtcacagagggagggggaagactaaatctggcctgtgttcggccctgagtcaagcttggcccaaagctaactctgcccccagacttttcagtgaagccaatcagtgctgatttttgcttaagccagtttgagctcgatttctgccccttgtcgctaacagactctggcctgagagaggcgcggtccagccactgcagactgaattacacacatgctgcactccagcatctgtggaagagaccttggacaggcctcaaagtgacgctaagatgctttctttctcttcacagcaagtgtcactgcctgatccactccatattgatgggtttatggtctgtctcacccattaagatataaactccataagatccgagactgctttgttcccctgggtaccccatggcctgagaacagtacttggcacactttatggattcaacaaacacttcatgaagggggagggaaggaggacattagtgaaaatgtgaggcgaagacacttggtgccaggctagtaaggaagggctagaagagagagaaccatttggatgggagaggagtgcgcgctggtgttgagaaccgtgtcggtggatctgcaggtgcacggaagggactgcagctatttgagtaactatgggaggcctgggcaggctgtggtgccaaggtgctgcccggagccttctggacacacggcagggctgaggggcatgggccaggagagggcccctctgatggagcaaccctgtcctgtgcctggacatgtgacccagctggagacagagggaggctatggaaggggacgtgagggtcaagctctgaaaggagccacccagagaacagaaagccagggtggagtccaatcagatcctccacaattgcctcccatctcttgttcctgtacccacccctgccaccattcagccctcctttccttctctgcctctactctcactcccttagatctggcctccacagagcagccagaagcactatc[131 bp omitted]aaaccctgtctctactaaaaatacaaaaaattagccgggcgtggtggcaggtgcctttagtcccagcaactcgggaggctgagcttgcagtgagccaaggttgcgccactgcactccagcctgggtgacagagcgagattccatctcaaaacaaaacaaaacaaaacaaaacaaaaactgcagtgtcggccgggcacagtggctcatgcctgtaatcccagcattttgggaggccgaggcgggaggatcacctgaggtcgggagttcgagaccagcctgatcaacatggagaaaccccttctctactaaaaatacaaaaactgagccaggcgtggtggcgcaacctgtaagcccagctactcaagaggctgaggcaggagaatcacttgaacctgggacgcagaggttgcagtgagctgagatggtgccattgcactccagcctgggcaacaagagtgaaactctgtctcaaaacaaaacaaaacaaaacaaaacaaaacaaaactgcagtgtctcccacagactagaggctgagcaccttgagacaggccacatccagccactcaccctccacctcccactgtggtggcactgaaaagcccgctgtcgctgcacgtcccacacttagggtgcacttctggacttctgcttggtttagtcccactaccaagagcgcgtggttccccttgttttccatggccagtgcttactcctgcacagacaccatctccttcaggaagctcccactgtgagaggcgtgcctgccctgctgcactccctcccgagcaggccttatatcctgccacggggcacgcggagaccacggccacagcagctgaaacagcctatcacccagcgtacaccgcatcaacaccctgcaatgagtgtttgaactaggccctctctctgtcattcatctacacaacaccagctgctacgtactcacaaatatttactaagccctcattctgtgcagggcgccacaggaagagtggagaacaggaagctgagggcagacgcttcaggagaaaacatctgactgaaagggaggggcgtgtttgcacttggtgaccaggcactgtggagccctggcactcccagaggggtgtgtggtgacagcatctacccctagatgtaagttctagaaagtggggcctcgtctgttccgtttctctctgtattctcagtgccaaacacagagcctcacacttaacaggcactcaaccggcagttagagggtgaatgaaatgtcacacgccgcaaggacaaggacccagggagccatggtcagggctctccagaggaacggaaccaagaggatacagcaataggagatgaacttggcccatctcggcccattgggacccctgctgatggcaggtctggcattcatgactgacccagccactgcactaacatgtagaaatgagctttagtcacatctgcacccaaaacacagagcgtcagttactcacgctgcatttctactcaggccaaaggttgatcaactgcaaatcagcacggctatcgcaaacagacaagacacacaagccccattccaggcaggaccgccccactgcccccgaccaccagacacacgggttgctgttcgtagccattccctatcaccaggctgattctggctataccagtgaggaagcagcgtgtgaacaccgctacctccaactcaagtttggggaatggacaggcggccagaagtagggaggcttcaacaacctgcttcaattcctagcccagcttttctttcacaggtcaagggaagatcaccactgcagatttctagagacccaccatgaagacctttaatattaaaataggagtcaaatgcagactatttgacccagaatctgtcaaccaagtggttgggttttttgtttttgtttttggtcctgtaacatgctccctgttgaaacctagtttgtaaaaaatgcagtctgtctggagattgactttacacatccgtatattaagagattagaaaaccaatacgaggcacagtggctcatgtttgtaatcccagcacttgggagggtgacgagggaggatcacttgagcccaggagttgaagacctgtctgggcaacataatgagaccctatttctacaaaaaacaaacaaatagccaggcatggtggcgcactcctgtagtcccagctacttgggaggccgaggtgggaggactgcttgagcccaggagttagaggctgcagtgagccatgatcgtgccactgcactccaggctgggtgacagagtgagaccttgtctcaaaaacagagagaaaggaaagaaactcatttgaccagacgcttctcaaagttatttgactagggagtcccccccatttccagggacatccacaatgaggcctgagaatgacgtttcaaggaccactgtggacaacactggtgtgtgaagcgggggagattctgagcccctcttccttggacacaagtcacctcaaacaatgtgtgaagtgctctggcccaccacatacttcttctctggcctcaccatggccttcaggggcactgtgcaccaagtcccacatggctgctgctgaattcagaaccctcgtcccatctagcatcctctaccctgcgaacctcctcagctcacatgcccagacagcacccagcctgagcccaacaattgtgatcctgtgatgatcacagacccaggccagggagagtcccctgctgccccctggtaccccaggaaaacagcaagggaagatggcctggccagaaactgaaaggagtgagcccctgctggcatccgggcccacggtgctggctctccctcccatcccctgctaccctcaacccacttgtgaggctccgatgcaaaatgggaccagctgggattccccaggacagggccggtgtcctggtcctggtctttgcagccccagcgatgagcacagacaggctaagaagcaagccagccccagcacaggaagcttggccatctctgctctcctttccaacttctgccagatgttgggaaccccttagacctgcttggcctgcccccccacctccacccagtcatcctcacgtggctatggctgtcagggtgctctgtcccacctagttgagcctgggaaccactctgccagctgcacagaggatgaaaagattcaatcctaatattccctcagcaattccacacatcccagcacccactgtgcactaagcactgcgtcggcctctggagacacgtccctgtctgtctagagcacccatcacaccttatctgaacatatgacacaggggaggcacagcaggccctgggaacatagagctggggcttccaacccagtgaggctgtgaagggagtgaatcagggaatgctgctgggagaggggctgtctggacagaaggacaagcagcatttggccacatgaccgggaagcacacggcagcagagtgaggagtgctggaggaaccaggtcagggtggcacatgcagtgggcctagtactgtgctaatgcttgggacacgccttggggacagactggaaaacagggcagcctgggggaagaggagctaagtggaggtggtagggtgggggggggggtggcacggtggggggtcacctccgcccttccctggggtctgaggtctgcacatttatacctgcatgtgtcagtgtagaagctcctaggaaggaaactccaatcaaattgaagcagttcctatgacagcttttttgaggaaagagccaaagatctctgcgatgaaggtggggatcctggtggaagggggtctcttcccctggtgggatacaggcttcctcctgaccctagaggaactgttctccttgcagggggcagtaggtctctgaggaggtggggggcttgaggaggtgggcccttcctctaaagcagaaatgaccaatctgggacccaggtggcttgggggtgtgtgtgcgaagtccataaaaccctcaccctgaaccctgatgaagtcacctctgtaatttggtggacagcatctttatctagggaaagggcccagatactgcctcttcaaagagtaaggagggtgaaaggaggagggcggtttcaacagcccacatgtgagagttaaatagcaggcttcctggtagcacctctacaagcagcctccagggaccaggactcaaaaaggttttatctgtattttttctgccaagagactgactggtggcaaaactttgatgacaaaatgaattctgtgtctatttcagaggcagcaaggaggggagagggtgctgtagagccccttgggacagggtgggtggtgggggcttcccagacttaaggaaaggagtgaggtctctgcagcctactgcaagcaaggaaaggagaaagcaaggagctgggctgaaccccagcggtggcccaggggagaaaggtgagtttcccaacgctccaggtgaagaagggttgtagaatcctgttttacctcttagacttatcttagtttctgccatgatatgcacagcaaaggcatccacaaatggggtctcccagacgcgtgatggtttcatatacgtggccagcgttcttcgagcacttctttatgtgttaggttttatctgcatcatgtcacctaatctccacaaccaccttaggaggtggcttacaccaacatcctttcacaggaaaggaaacggataatcaggtcaagcgacctgtcggaggtgggcccgggtcttcgggccaggtgggccgactctgaagccccggcccatgctcctgagtgccacgctccactccgctgctggccaagaactacgtgtgcaaaagggaggagttacctggactccagtttgcttcctctcaccttttctgtgcaggtaggcctcagagctacaacacatacactcttccctttagagaaatgacagcaggaataaagtagctgtcagttgctgttctggataagcacctatggaggagcacgaaccaaactagggggctagtcatgagttccggggtcagtgaaaggcttcccacaggtcacatgaccacctgcctcagccaacacagtgtgtgattatcccaatggctgatccccgacaagactgcaatcctttaaggttgtcaagacaaggatcaaagacacattccaaggcacacactcaatggtgacacaagctgctttctgtcttcatctgtcaaatgttcggccctggaatgctttgcgtaatatattcagaatctaagctgacaacacacacactctcgcctccgcctctctcctcttccgtataaactttctttcctcactgctgcagagaataatttacaaagaagcaagggcagccctgccttacagtaagctttgcttccccaccagcccatggctgtctccagcctgtcatggaggatctcccgctaaaactaaatagaagaaactacgtaggcctgggaaaacacatataagagagaatctggaatatctttgctttttctgtttattcgcctcctgactgatgactccaatacctgccaagaaaatgccctcatctagaaagcaattgagaactcctgaccaaactgtcagcaaggtacttgcataaaattagctttaatcctgggctgatatgtcttaatcttcttacctgtgaaaaaaatatggaaagcatctcgccaacacaaataacagtctattaaaatgtggcaactcctgtaatctggtgacacgatcacaacccttcaagtcatttattttttcagaaattattataaacagttctgtgccacagcacaaaggtaaatctgtcactgacgtgtcaggtctgtcctccaactgattctttggtacggaatggaactgatctcaaacatgcagttgctaggtgatgcctctgcggatctccgtgtatagcatgctcgggttctccagcccagctagtggaaggcggtgggaccctggatgactccgttcttttctcaatactcgaatatatttctataactttcaactggtctcatggagattatggggacacactttttggagctgatgatatcctacattttatgtacttctttctggaatgctcatcatcttggcattaccttcaactaccgaactccaagccaacttccaaccactctcatctcaccaccagatacttacacttccaacaagcattgcaggggcaacaggcatttgttaaaaggcctttactggactccgaggtaggtactttacatatctagtctcattcatcatagacgcatccccatgacatcctcctcatatcccactccaccccatgagggccaagccacattctgccttctttatttctacctttatcagccctgcagccaaacccttctaagcttccactcctgcgccacccagaccgtaagccccggggggcagaacttgcacttctgaacagaaaccccataaagttatacaaagtcagcaactctgcctacaactgtatggatggctgggttcagtggctcatgcctgtaatcccagcacgttgggaggccgaggcatgtggatcacttgaggaaaggagtttgagaccagcctgggcaacatggtgaaatcgtgtctctacccaaaatacaaaaattagctgggcctggtgggatatgtaatcccagctactcgggaggctgagacccaagcatcacttgaacccaggaggtggaggttgcagtgagctgagatagcaccactgcactccagcctgggcgacagagtgagactctgtctccaaaaaaaaagaaaagaaagaaaaaagaaaaaactgcgtggagagatggaggatccagctttaacggcacttttctgttccgccactaggtggtgtgacaccaacacagctgaggcaacatgcaagtggctgaagactcgggaaagttccagtagagacaacaggaatcccctcctctctacacggaagcttacaggaaggaaatccaagaactacagaatttatgctgaggcagcagagcaaaactgatgatactggagagcgcgggctctggtctttgtgtgtgttcaaacctgccctggccacttacttgcggttgggatcccagataagacaatgtacctctggcacaatgtcttcatttgcatatcagggctgttatttcaccccaggcagcttcggcaaggatgaaatgaaatgctgcacatgccgtgtttggggaagtggttggcacacaggatgattccacactggcactggtagcattattatgctcggaagattgcaaacatattgatgccaccttaaagcataggccttggattcaaggacagctgccagtgcccggcaacgacaaatgcgtcagagtctgaccccttttagggggtggaatggttggatccaagagctgcctggacgcctgggacactcaaggcaaacgctcaggtgctcggaatgcctgagcccttctgaggtcacaggaaacaggtgggatctgaaggcaggccgagccgagcagccaagccttgctctcaccagcaggatctaccaagcacagacttgtgctaggcaccgagcttgccactggagacaggaaagaaatggcagacaaggccgcagctctctactgggaaagagaaaacaaacaagtacctgctgtgtgcagagataactgggtagttctggagctgggtgctgcagagaaaataccacaggatggtgggagagagtgagtgaatgggtaaggcctcgctgaagctcacacatgaagggtgagcagggatgagccaggtgaaggcaggggatcccaggcagaggggaccccaagtcaaaggttctaaggaaaggaagagcctggaggcccatgtttggaggggaggagaacgggaagggctgggtggagcccacaggacgttcagccttgcaggccatgctgacaaatctggatttatccagtgtaaaggttggggcccaggctctggactcttaggacccagtggccatcaccatcaatgctgcaaaacatcctctctcctctgagcagagggtaactgcctgttttctcaccctctcccccagagaaaggcaagttctcaaggaccgtttccactcacgctctgctctcacagatgcaacgcaggaattaattctgggtaaataagttcccaaaattctctgtggcaaacctgggggagtttaatttagcaaaggcattttaaacttactgcaaaaggcaaggcctgccttctaaacatgtgtatggagtaactactactgtctctagaatttcctccctttctttgaacaccataaacagcgacagcgaaatgcagtgccctacgcgggtcagttttcaggggtgaacgagtgcccattacctagagtttactgactcaccgggaaggacaagcatgaactcctagactccatggctggagacaggcgcactggccctagccagccctacctgcttccatggcctcgggcttcagcccctgtgaaatggtgcagccaggactcaggcatccctgaaggttcttcccagcccttacattctgtcaggtcctcaccctggaccagaggcagtgttaaaggtcaaggaaaagactgttcttcctgaagagggatatgatgtccattgaggcctactcagctgccaaaaggccagaatagaaaaataaggttgggaggaagggccttaaactctagctggcaattaatttattcctgggtaggttcctttgatcctatgaccagtggttctcacccaggagtaacttcatctccctggagacactggtcaaaatctggagacattgtgactgtcatgtttgtgggggtgtggaggaaactgttacagacatctagtggatggagaccagggatgctgaccaacatcctaggaggctcagaacagtgccctaccagcaagtgacccaagtccaaatgtcaactgagctgagggcaagaaaccttgcattaatcttgggcaaaaaaattgagctggatctctaactcacattatacaccaaaataaatccccaatagattagatggcacaaaccagggtgaccccccaccctggcttctgggattcaccgcctctctccctccccactcagactgtggctttaaatgtgtacaggctcctacgacctcagtaggttagataactatggaacacaaagtctcttgggtgtcaatgaaatcccataacccaatggttctcaagtgggggcaattctgacattaaggggacactggacagtgtctggagaccttttatcttctcatgactgggagtggatgggtgggatgactgggtgctatggcatcacatgagtagaggctagaggggctacccaacatcctccaaagcacaagatggccaccaccagccccaatgtcaagaatactgaggtggaaaaaccctggtataactcacagggtgctttctctctactcaggcatccaattaggagaatcacagctagaagtaactgacatgtatctccacattccagtaggtcaattaccagaagtatattctctctcacaccacaatcctcagacttgcgtatcatcgttcccattttacagatgcaagagctaaggtcagacaacttgcccatgtttctagggcagaaggcaagacacaaaccaaggacagccaatccaggtgcttccaaccatgccacaagttgccaatgggaacctgctggtcagctctggtttagaattctcccgatgttggcaaggcagcggagaaacccacactgtacactgaggctctgctagcacatgccagtggttctcaaatttcctggtctcgggacccttttccacgcttgtcaatgactgaacatccccaagagcttttggaaatgtgggatgtagctactactgacaccatattagaaatgaaacctaagacaatttcaaaatacttaagattataataaactccagaaaggtttagttaaataacatatttttatgaaaaataagtatttaaaaaaatctgagaagagtggcattattttacattttgacaaatgtctttaacgtctgacttaatagaagatagctgaattctctctcttttttttttattaaagagaggggctttgttgcccaggctggctttgaactcctgggctcaagagatcctcccacctcagcctcccaagtagctgggactgcaggtgtttgccactgtgcccggcctgaattctcttatctgcttctatagttcatctgttggcatatcacacatccaataacctctggaaaaaaactccactgtccattttcaagtgaataagagtgaaaaaagagcagatagtgtctttgtgttgttatgaaatagttttgaacttgcagtccccttgaaaaggtcttggggactgcagggccccggaccatctttgagaactgctgccatatgctatctgagttctagcattccaaggacactaaatcctaaattacagaccatgaggtgctttatgctaaggttctagctaaagagcactctaagtgtagagaatgcagagtctaggagtctgtataataggattgaaacccaaataccaaccaaggtcacaggcactggaagagaaggaagtgggctaggccccaagtaacatggcggagaccacaatatccaatctaatctatccacaggcgcagctgttccttagcactgaaaaatcactgctgtgcaagaatgcaggccaagggtggttgctgttttctgagagaaatcagaaatacaatttttttcccctctgaaatctcagaattttaagtgttggctcctaattacaaacaaaaacctaaatgggccaaattaaatatgtctgcttgcccttcaggcaagtttgcaacttctgcctgtggttttcaactctggcttcatgttgttaaacatctgtggagctctttaaaaccacagacaccctagaactcctggaaccatctccaatggtgcagcccaggcagcagttttgattttccctgacaacctccttaaacaagtgtgaagcccatccagggctgagatccatagctagtgctgtgtggcagctctaagtgccaagactactgaggaggaagcaaactgtggacatgtggaaggtggtggtgaggagctttaccctgatgtcccaggccacgttattctctactgcgtagggcagagtcaaacagaacaccgctccaccaggaccccctaaaacaaagaaaacatcaccaccagaccctgaatagataatgatgcaagcccaactgcctcacgattgcttcaaagtaccatggagagctaccaaatgcccagccaagccaataccagccatctcggcagttttgtggtcctctggtaagttttgaggaacggcgctctcttctcagattccccaaatgcatctcaactttccccaaatggccttcgtctcccactacacccaggcctattcactgtctgaactcacgtaggagggcagaattcaaccccccttctccaccccaagctcctccaaatgccactcgaagctcaccccattcctgctgcttctgctcactctgaccacctcagaggaggagcacacaccagacccaggttgaccctaacacctaatgaatgcacgagggtgccgggaaaatcccattttctggtaaacggagaggcaggctgaaggcttgtttgaaacattttgcagaagcccagtgagggcttttctgtctatacgcaggatcctgggcaaaatggaaagtctcttcaaagagtataaagattttgcagcctggataccccttgggtaccatcaggccccttctgctacagatacaggaggcacagtggaggtgaaagcacacattctgctctaagcaaaaatcccagaattagtttttataataaattcacgagaaactttccaaaagttgtttaagataggttccaactatttcagttctagctaaccaataaaaattcagttgcatctcaccctctcaggggctaggttttaagtcaacaaggtgcaagctgagagaagccaaaccaccctcaaaaatctctcgactcatacctggtcaggcttttaaatcagtagttctcaactgaaagcaactctgcccccggggggacactgggacggagacatttccactgtcatgactggcggggatgaggagggggatgtgctattagcatttagtggggtagaggccagggatcctcattaagatcctacagtgcacagcgcaatcgcccacaacagagaattacctggccccagatgtctgtagtgctcaggctgggatccctgagatcactaagtgacaggcaggacagaacttaggaggacccagagcccaggccctgctggtcttctgccaggggctcagcccagggccaactctgagtggggcaggttcacccacacaatggagactttgctgaacccttcagctgaatgtgtccagagcagagtgcactgtagtaaaaacagtgacctgagtgtttattactatgagcagagactggtgctaaacaatgtatgtgcactcattccttcaatgctcacagcaaccacgaggtgggtgtggttaccattattcccattttattggtgtggaaacggggggctcaaagaggttaagaaatttgccccaaatgactcagagtggacagcggagttaaaacacaaacccagctctctgaggaccaaagcctgtgtccccaccatcgataccagtgagtctctcacctgggggcgattctgcagcctccccacccccactccccaggggctgtgtcaggagacttcttctgttgtcatgacgaccccgcgagtgaggggaggtgtgtgctactggcatctagtgagtaggtccaaggatgctaccgtgctgctaaggatcctgcaacgcacaggacagcccctcccgccaaagagagccatcaaaacgtcaactgcaccacacaaaggtgagagccctgcttcacactgtctcccgggtttccaccacgcatgtccacaggccaacagggcctttcatgtcaggatctagaatccaagattccctggagttcaaatgtgctttgctcaccctctttccagtcttctttacctttgccagggacaaaactctgccttcaaatcctgatgtcagcctacaatgcagcataaccctagagacaggatgagtaatgagtctgggaggtatcaatggggaaatgccaagcaggggagacttatccctggatgcaagggtgaaacatgcacacacactgtctgagaggaaaagcactcaggtggactttaaaagtcccagaccacaggaagggctgtgagagttgctgtcaccatccatgaggcgttcaccatggtgacgagggccaacaagatgctttacacaacagaaaacatttcctcgtatacaagcagaggacacctaccctctactactcaaaccagcgggtctcaaccctgcctgcacatgagaatcacctgtgctgccacctgtacagaggcccagaacccacccaacaccagagagaatcggaatctgcagggcgtggcgactgagcatctgcggtttcaggaaagttccccagggggtactgatgcccagccgggtggacagccgctgctcagcctgacacagaggtgggactggcccagagaagagagatggcaaatggatggaggagggactgggtgtgagggtggagcaacttatgatctcagtctggaaaggcagaagccaagagggcatttgactagagcttaaacagcaagaacaaacacgtgaccatggggcagcccctaaagcttcaaaaggcacaggcaaggaggccccactttacacagtgaataacaaattaaacatcctggcaggctgtacaagccaaaaccagaaatggagtgttcaagaaacacacaatgactgattgaaggacggcagggatatatgaggcacaaagtccaccaagatttgatttcctgaggacagttatcccagaactagcgtcagggacaacgtgctaggtgagtgtggcacttactagggaaaaaaagtgaagttcaaaacattccatttctctctttggcccttaccagttcaactatcccatttacaaccaatagctcatgtggacagcatatgctagaaacagtatcccctggaaaagggcaagccataatttcccctttgtgctcaaatgtattcctcacaacagggtcctcactggtgaattcattcattcatgcattcattcattcaaccaatatttcctgtgtacctactctgtgccaggcaccgttctagatgcaagggggcaatcagtgatcataacataaaaatccctgacctcatggagcttacatggggcaaacatgcatgtaatatctagcatgccggattgttaagagctatacaggaaaatcaagcagggtgaacggaatagagaacatggatttaatttgaaataggtggccagagaagctctcattaataaagtaacatatatgagtaaaaaccagaagaagtgagccatgggggtatctgggggaaaactgtttcagttagaggaatcagcaggagaaaaggctaaaagcggggagtgtatgcaacattcaaggaaaactgaaaaagccagagtagttagcacagagcaaggcagcagagagtggcgagagagaaggacagggacatattggggcccactatgggctgagaagttctcagatgggtaagggtggagggaacgggggctaagcattgacggtgttggtggggagaagtggtggtccccctttgggaataattttaaggtagaaatgatagtatttgctgtgcagtatgagaaagagggaaaccaggggtgacttcaaggtttggggccagaagaattcaaagaatggacctgcctaactaactacaatgggtgaaagaccatgggatgggcaggtgtagtgggggagataaggattttgttttggaaacgctctagacttacctatgacacatccaaatggagatgtcgaaatgtgatgctggacatgagtcctgagttcaagaagctatgtgggctcaggatgtaaatacataaaatatgtcatactgattcccacttacccagtccctctgtaactagatctcatgagttggaatgc[151 bp omitted]cccgtctgtactaaaaacacaaaaattagctgggtgtggtggtgcgcgcctgtaatcccagctactcgggaggctgaggcaggagaatcacctgaacccgggaggcggagattgcagtgagccgagatggcgccactgcactccagcctggctacagagctagactccgtcccaaaaaataaaatagaataaaatggccaagaatcagggagagaacctgtgctgctgcctgtacagatgcccagcgcccgcccaacaccacacagaatcagaatctgcagggactgagcacccgtggtctggcatctgaagccaggccatcttggttcacatccctgctccttcccagctgtgtgacacgccttggataagcgacttaaccacgttgactcagtctcctcatcaagtgaatggggctaacagtatctatacctcctaccagggaaaacagtatgtcaagactttgcaccacacctggtaactaccctaaatgctccacaagaccaagcacttcctatcatcattcattcattactgcaattcggtagggaaaaccctccagtcacagggagcaccgaatgggggaatcagagccagacaggtagagagcttgcctgcatttgtgcaactagaaaagggggggagctaaaaataggcctcagaagtcttgaagctacagcgatggcaacacgactatggatggaagcagacatcagccttatggtgccttctcgggggatctggaagtgtaaccttgtcaaaaacactcaggtgggctgtcagcgctccacagaggagggactcgcacggtctcttgtctggaagtgcagcaaaaagggccaaagagcagccagggttttcggcggcccagatcctgcggcggggcctaaatgagggggagacgaagcgccccgaaggatccggggggaactggcgggaagtgggggccgaagttcggggcggggacggggtgaaaacggcctgggcttcctccgtccgcggtgtgcggctggcccgcggaggacgagggcctcacgggcttaggagataggcagccaggccggggaaggggagatgccgggtggcggaggacgagggggcggggagggagcgtggcgcgctccgggccacaaccaggccctaaggtctatttacatccgtggccgaagcactggggccgcgcctcccgcccccttcagccccgagcttggctgcgacgcagaggggccttagggctgcgatcccgatggccacccggctcctctagccagacggctgcagtggctggggttgccgggagtgatgggccgggccggtgagcccggcctgaggggacgcaatagggggcggctgcaaggcccgccacggcgctagcctggagcggacgaaacccttgcactctgcggtgctccccccaagggcttgtggcccctagtcctcccgccgcccgttccccggccgccagccggtccccaacggcgcctcccctaccttcgttcgccaggtccgccattttacttccttaagccctcccacaaggccccgcgccggcccaggctcgcctgctttctgccagaaactcccgcgcgtgcgcacttaacaagccgactccgtgtgaggcggccagctcgcgcctgcgcgctgaatgccgcgcggaggcgagccccggatcgcctgccctgcagagcagcctgccctgacgagccgcgctcctagcacgcacctgcgcacgagccatctcccgcctccttttcccgccgactgagagggcggggaaagggccgggaagggcgcatgcgcagtggcagcgactaaggtttagtgaggcggcaccgcgcggcccgaggcgggtcttgaagcactcgttttcccactcgttttccggggttcccccgcggtgggacagtgagcagttcagggcgccgcagccgaggccttcctccaggtaaatcgccgggcctgcgggggcttcccacacgcgcgggcgggagacgcgttgcctcctacctcagtttacccgccttaggagccggtaccttcggcaaacgctttcctgaaaccacgggggaagtggcgagagggcgcggggtgcttgggattggggggtaaatcagagctcatcggcgggggcgggggtcgtggtcaggctctaggagggggcgcagccctgggacccaggtgctggcgttgggggcggggggagccggcgcgagggactcgacccctcggagctacgagaatcaacttcacaagctcatgggaggggaaccgcgcgcctccaggttacccatctgtaaaatgggaccatcagcctcactcacaaggctcatgggagggtcctggacaccctggagttgttctctactcacctgctatgaatctctcagcaaatccttcggacttggccttgcctccaaaatacagcccagagccacccattgtcacccccaggctgtcaccaccctaggccacatcgtccgtatctatctcatggaagacttggacagcggcctctctgctatcctttgctgcattcttttgaagccccaggcttggttctgcacatggccgcaggctgaggagtctttgaaaaatataatcagccagacgcggtagctcacccctggaatcccagcactgcgggaggccaaggtgggaggatcgcttgagctcagttcaaaaccagcctaggcaacagagcaagaccccatctctacaaaaacacaaaaattacccggatgtggtggtgcaagcctgtggtcccagctacttgggaggctgaggcaggaggatcacttgagcccaggaggttgaggctgcagtgagctgtgacagtgccactgccaccatcctagggacacagcaagaacctcccccatatatatacacatatatactttgtttttatctatatatatacacacagatatatacatacacgtgtgcatatatatgtgtgtgtgtgtatatatatatatatacacatagactgaaaatggaaatatcaaggccactcagtgcttccagagggctctcagctgaacttggaatatcctaaaccttgtattcaggtttatgaagtcccctgaacttggctcccatgccctgctttgttcccccttgctcattgctgttcagccgcgtgggtctttccatccttggagcacaagctcattccaacctaagggtctttgcacttggtcgtctctctgcctgggaccttgtgtttcaggtcttacctaggttggagtcccagctctgcacctttttgagtatgatctaaaagagagcgaggagtactacaatctgtgggccagatatagtctatgagctaaaaatggttcctccctccctccccttgttccctccctccctttccttcccttccctttcttttatttattttggaatctaactctgttgcccacgctggagtgcagtggtacaatttcgactcactacaacctccgcctcccgggttgaagtgattctcctgcctcagccttctgagtagctggcattacagctgtgtactactatacccagctagtttttgtgtttttttgtggagacagggtttcaccatgttggccaggctgctctcgaacttctgacctcaggtgctctgcccaccttggcttcccaaagtgctgggattacaggcatgagccaccgcgcctgccgatttttttacatttttagctggttgggaaaaaaaataccaaaagaagaatatctattgatgtgaaaatggtgtgaaatttacatttcagtgtctgtaaataaagttttatttgaaaacagccaatgcttactcatttatatattgtctctggctacttttgagctgtgacattagagctaatttttttttttaacagaaactttttggccaacaaaacttaaagcatttactgtttgtgtctttacagaaaaagtttgccagttcctaatccaggacacatgtatttacatggttgttaaacttttctgaacagccagtgggatgtggtaaatatttaacagcagcttctctggaagagaatgtattcgttagtatgtatttatgtgtgtgtatatagtttattgtaaattttacttatttttctatcactttcttaagaccacaagacaattaataaaacaaattgaaccctgttttgtagcgtctgctgattttctgggtgtgaatccttcagccatggcctatattgttactaatgggatgtcactagcaccagagttgggaggacatgcgcagtagtagcacaccagattcttttttttttttttttttttcttttgaggcagagtctcgctttgttgcccaggctggagtgcagtggcgcgatctcagctcactgcaacctctgcctcccgggttcaagcgattctcctgccttagcgtccccagtagctgggattacaggcgctcaccaccatgcctggctaatctttgtattttcagtagagactgggtttcaccatgttggccaggctggtttcgaactcctgacctcaagtgatccacccacctcgacctcccaaagtgttgggattacaggtgtgagccactg[133 bp omitted]ccagcacagtgaagccccgtctctactaaaaatacaaaaaattagccgggtgtggtggcaggcgcctgcaatccagctactcgggaggctgaggcaggagaatcactcgaacccgagaggtggaggtttcagcgagctgagatcgcaccactgcactccagcctgggcaacagatgagactctgtctcaacaacaacaacaacaacaaaaacctgctactttctcagtgtgtccccacaccagcagcatcagcatgacctggaagcttattagaaatacacaatctgggctgggtgcggtagctcacgcctgtaatcccaggactttgggaggccaaggcgggtgaatacttgaggtcaggagttcaagaccagcctgaccaacatggtgaaaccccgtctgtactaaaaaaataagaaattagccaggtgtggtggtacacgtctgtaatcccagctacttgggagactgaggcaggagaattgcttgaacccaggaggcggaggttgcagtgagccaagatcacaccattgcactccagcctgggcgacagagtgagactgtctcaaaaaaaaaaaaaaaaaaaatacacaatatggccaggcgtggtggcttacacctgtaatcccatcactttgggaggctgaagtgggcagattgcttgagcccaggagttcaagaccagtctgggcaacatggtgagatcctgtctctgcaaaaaattagctagttgtggtggtgttcacgtgtagtccccagctactcaggaggatgaagtgggaggatggcttgagcccaggcgttgcaggctgcagtgaggtaggatggcacgactgcactccaggctgggctacggattgtgaccttgtctctaaagaaaacggttaatttgaaacttcacacctgtaatcccagcacttcgggaggctgaggcaggcagatcacatgagcccaggagttcaagaccagcctgagtgggcaacatggcaaaaccctgtctctgccaaaaatagaaaaaattagccaggcgtggtggcacacacctgtagtcccagctactcaggaggctgaggtgggaggattgcttgagtgcgggagacggtggctggagtgagctgagatcacgccgctgcattccagcctgggcaacagagtgagactgcgtctcgaaaaaaaccaaagaaagaaattctctaagagtagctcgaatgtcagtccccctggtcacccacagtgtgtagaattcaggtcatctgtcattcctggggtgttggtttcattattttcaggtttccccaaacttctcttgggtaggtcttctcagcctttaccatatctgcacggtgtgacct[138 bp omitted]gcctcagcctcccaagtagctgggactacaggcgcccgccactacgccc[168 bp omitted]aaacagatacttcgtatcaccgtttaaaatggaaaaccactaagccatgagtagaccattgtaaaagcaaacatgaaaatgaaacaatgttttcacattcaaagtagatactgtcgcctgccaaggtgttgggcctgctttttctttgatacaaagggagattagcaaagtattagagcgttattgaagaggcttcagcacttggcggaaacttccttcctgatgtgatgagaaggagtgaaagagaattgaaaacgggctaacataatctatgttattcattgtcgtttaacgccatgtctacatgtcgcctaaagtcatgtcacacaccacattcatcccacactttgggaaactcgcagcaccatgtcatcacttgctaaatagaatccagtcgtggcttttcaggggacactgagacacgcaaaacctgtcaggctgatgagccaaggacgtttccagtggtttcgcaagcctcctccaagtgttgatggctgccagctttcctcatctggcctctcgtagcaaattaacttagtcaacattcacttacacaaatatttgtcagttgcctactgtggtagctttaaaatatggccccaaattcgttgacccttttcccagcaagagaggagggtgcagctcccttcccttgaatgtaggtgggcttgctgatcaatagagcacacaggaaatgacaccgtgtaactgacgacgctaggacataacggacagagatgcagcttctgcagcattgctggaacagtctctctgaaagcttttggccaccatgtgagcagtccaactgccctgcggctgccatgctgtaaggaagctgaaacacagatctcatggcaaggccctggccaagagatgcccagccaaaccccaacagctcctgcggcagccgctgactgtaattgcatgagagaccctgagccccgtcagaaccacccagcctagcccttcccattcctcacccacagaaactacgaaagataaagaattgccattatcagccactaagctttagggatgttcattacacagtagtatgtatccaccacacctatgaggcatcaggcacatgttggattcccgggatgaactagacaggccctgacttcacggagatttgcagccttttgtggggagactaacagtagacaggtaagcaaaataatttgagatagtgatgggtgctacaaagaaaataaaacagcatgctatgacacagtgacagaaagagggaatactttttgtttgcttgtttgttttgagatggagtctcactgtgtctcccaagctggagtgcagtggcaggatctcggctcgctgcaacctctgcctcccgggttcaagcgattctcctgcctcag[221 bp omitted]gagccgagtgaccaaaaagagaggtggtggagatgagctcagggagggagcgtgcagggccttggaggctgcagtgaggagttagggttttctcctaattgcaggggttggaggcaggaaatgggagggcttcaaatgacttgcccttaactgctgattggcctctgtgctgtcagcttcctccttggctcaccaggatacaggtctctgaggagcctctgaacccaggctgagctctgaagacttatgtccctctctcctctgcagccaaagaggacgatggcttctgcagctgggcttcaggaaaaggggtcttcacagctgcaattaagttttcatcttcccatcatgggcagggagccagcatgtgtttttatggagcaaaaggagctttgctgtctgacgcgctaggagccaatgctaggacatgggtttgtgagaaaagctttttattgcaagttgactaacaagcagatgggagtccaactcaaagctgtctccccgtgctagctttaagaccatactttttgcgtgtgtggagatggggtctggctatgttgcccaggctggtctcaaactcttggcatcgagcaatcctcttccctctgcctcccaaagggctgggattgtaggcctgagacaccacgcccaccctaaggcagtcaatacctttattagaagaggtgtagggggtagactgtggcattagtaggtaggtgactggtagaaaggaataggaagtctggaaagtcctctggcatgcgcagttatctcttcatccctcatggagcgcatgtgcaagttcggggggcattagtctaaaccatgcggtagaaattgaggctatgacatcagcaagctcgttctgtgcaaactccagtccgccatattgttccaactgacttcagccagttttgttatcttacaagcagagggagtttcagtaagttgtttcttttcttatccagcaaactcaggaatttctattagtcataggtttctttaactcctggggcagtgcttcagtgcctgctctgtgcccagcccacactgaggttgagtacccagagatcaatcaagtataattcctgcccttaaggagcttggagccaggtggggttggagggacttcatcatgaatgcgttattagttcatctgccttccccgttctccctcaacccacggcctcaagttcctgacaacaggatgtcggatgtgaccaatggtggccccttgcccatgatggcaggaacccctgacccaaactaggcacatcagccagggatttgggactggaattgcttctctctggaagaaagctgggctggatcctgttaacatggggtagggccacattctccttcacatgacctgatctgcaaccaggtcagccgtgctgagaggtggagagcccagagtgccacagccgggttcccaagccttcactttgctcggtgacacattcctatctcctgatcaactctgctttttctcctcctcctcctcctcctcctcctccttcttttgttgagatggagtctccctctgtcacccaggctggagtgcagtggcataatctctgctcactgcaacctccacctcccgggttcaagcaattctcctgcctcagtatcccgagtagctgggattacaggtgcccgccaccacgcccggctaatttttgtatttttagtagagactgggtttcactatgttggtcacgctggtcttgaactcctgacctaaagtgatctgcccaccttggccaggctggtctcgaactcctgacctcaagtgatctgcccgcccaaagtgctgggattacaggcatgagtcgcggcacccagcctctttattttaaattaaataaattaaattttacaataaatacatttgaaataaattcagacttaaaaaaagttgcaaaaatagtacaaagagttccatatagcctccatcagcttcctcagatattcacatcctgatcaaaatcaggacattcgcactgatacagtactattcactaatgtgcaagccttattcacatttcctctgttcagctctagtgtcccttttctgttccaggatttagtcctggatcctgtcttgcatgtaggtatttctccttagtttcctttagtctggatcatttcctccattttttatataccttttcttgacaacgacatttctaacgagtactgcccaatcatttggtagaatgccccttaactttgggtttgtttgatgtttcctcacagtgaaactcaggttaagtgtttttggcagggattacgcagaagcgatgt[136 bp omitted]cctctgcctaccaggttcaagcgattctcatgcatcagcctcctgagtagctgggactacaggtgcgcaccaccacgccaggccaatttttgtattattagtagagatggagtttcaccatgttggccaggctggtcttgaacttgtgacctcaagtgatctgcctgccttggcctcccaaagtgttgagattacagacgtgagccaccgcgcccgtccaatcgcttgctttaaatggtatctgccaggtgactttttcccattgttatgttggggggatattttgggcctttgtaaacaaataggaaatattcgaggaagagaaggggaggaggagaagggaaggaaggaaattagctcactcactcacttgtttttgatctttcttatcatgcatcgttgcaaataagtaaacaaatcagccaggcttctgggcaaaatccaactttgtgtcccctgtgaaaaggaaaacgctgtgtcacagagtgaccactggggggcagcagagacttgagaggaatcaaaacaactccaggaaaaagggcagttggctaccttctgggaaactaaacttaccggtaagctccgcatctgctggggttctggtgtcttccatgagccaggtcgtggaagtggaggtagggagtcttagttgcacctcgctcccagcctgctgctgctgttgccaagccgtatggatgccccaccttgaaaactggggctgtcacctcgggagggcttcacgaggtctgagaatccccttctgagactggctagaaaattcctgggtgctgagggtgtacctgtttggagactgattgcaaccccccgaaagcagttctggaagatgtaagccaagggggaatttactggaaggttatgaggatattcatgagatcaaaaagaaaggagaagcaaccagcagtttcaacaggtcttagaagcaaaaatcactgaggacaatgcgccgggtgtctcccccaggatgcctgatctttgactgctttcagtctcacccttcaacgcagggttcagagtctaaggagaaagtgttggatggggtcagcagggtacggtacgttaatttgtgctcacccccaatcaaattcattcctccataaatattttctttcttttttttttttgagacggaatctcactctgttgcccaggctggagtgcagtggtacgatcttggctcactgcaacctctgcctcccggattcaagcgattctactgcctcagcctcctaaggagctgggatttataggcaccgccaccatgtccaactaatttttgtatttttagtagagaagggggtttcaccatgttggccaggctagacttgaactcctgacctcaggtgatctgcctgccttggcctcccaaagtgctgggatgacaggcttgaggcaccgtgcctggcccttccatcaaatatttattgagcaacaaatacatattgggctctgtgtgcccagccagtggtatgagatgccatttgagacatccaagtggaggcagccagtggaatcccagctcctccccgggacctaggaagcccccatcccatgactctgcagccttcctcaacctcctgccctgccattcactctgtgcccatgacaccagcctcctcactgctccccccacccccaacacactgagctcatttgctcccttcccacctggaaccgcctcactcaatatgtgagagccacccacacagagacagtatttaaagccacaaaaggacggtcactcttccaagagaatcagggtgttattccaaaagaaggcaggatggatgctggacagcaaaaccccacaaaatgtccatgacaggattccaggaggggcccatgatctcacaataagctgagaacaactctcagccctcctgagagcctctgtgtgagtgcacgtatactcatgcatatatgatactgtggctttggagacctatgcatatgcattttacattgcagcccaataccataaatgcatgtgtatatgtgcactcacacatacactgaaatgaaaattttgcaaagctatatttatccttattacaccatcactcctgatgttttagttagatttttatcctggttcattagaaaaagaaagagaaaaaaaaagccaagcgcaatggctcatgcctgtaatcccagcactttgggaggctgaggtgagcggatcacctgaagtcaggagtttgagaccagtctggccaacatggtaacatcctatctctattaaaaatacaaaaattagccaggcacggtgacacactcctgtaatcccagctactcaggaggctgagggggagaatcgattaaacccaggaggtggaggttgcagtgagctgagattgtgccactgcactccagcctgggcaacagcaagactctgtctcaaacaaagcaaagcaaaacaaaacaaaacaccaaaccacacacacaaaaaacaaaccaaatcgggtataactcaccaatttgatctccacagggctcctgtgtgcccctgctccaccccacagccacaactctccccctcacttgtacgattttaacaagcacctaattgacccccctgcttctgtttcttcctgtgaatccaccctgcccgaatacatctttctaaagcccagctttgattacatcaaaaacctctggtggcctcctgcctgaattccagtttctttggaattccttgtcactcctctggatatttttctctcctccatggcacagcaccttccttcccaacatcaccgtaaaaaacgccttctctgggaggccctcctcactccctcacaccctcaatatttgctgagcatgcccggtgatagatttgggaagtccatttcaacaaggcaaatgatagctactcactcgcagagcttatgggaaagacagatttgcaaacaatgactataaagtatggtaggggaagttgggtctaagtgaccctaatctacccagagagcatccaggaaggcttcccgaaagaagtgccaatcaaggtgagtgctaaagaggaaggtgtctcccaggcgacactggcagtgtccagagacatttttgcttgttaggattgggctgtagtgctcctggcagggagtgggtggaggccagggatgctgctcagcaccctgcagtgcccagtacgggcccccccagagaattatctgatcccccaccatctgcggtatctgcagtgccgaggggtagaaacagctcttgaaggcttagtcccgtgctttctgtatgttgaccttctttctcacaacaccgtgaggtatttttaatgtctcttttccagtgggagaaaccgatgaaggtaatttacttgagggcacagtgaatgaccgtggagctgattctcaaacctgtgcagtctaatccctgccactctgcctctcccggccgaggaggagctggggagtagcaaagaggaaggggagaagcgctcagttggcggccattttgaggagcagggccaaggggcggggcggggcaatgcggggacggacggtgctgccaaggctgtgatggagacttggggaggaggtctggacggccagatgccggaatgctgtcttgctctgccgagggccaggcacccaggagctctgggcagaggtgaagtcagcagctcctggagggtgtttccattgtgggagtggctgaggtgactgagggggtagaaggaggagaggagtgggcaggacccaggcgcagaggggcagcagccagaggcaggaggaaaacaggggtggcggcggttggcgggggtggggggcactccagctggagcatctcccctttcttttttttttttttttttgtttttttgagacggagtctcgctctgtcacccaggctggagtgtagtgacgtgatcttggcttactgcaagctcctcctcctgggttcaagcgattctcctgcctcagcctccccagtagctgggactacaggagtgtgccatcacacccggctaatttt[156 bp omitted]gttgcagtgtctggggtcccctcccatcttgcaagggagttcctgccaccagaaagtttgtgaaggcagggacatctctgggcctccccacccctccttgctgacgtctgtctggaggtcagggctgtaatggcagttccatcatcaccagggacccaggctccttctgactcattgcttttccatccttatcatggggcttccaccttgaggtccactgtggctgccgtgctccagccatcacatctgcattccagccagaagccttgcttttcccatgtgtacaatggggattacatctaccttaggtcatcaaaaataggagatgggatagaagtgtctagtgtggagcctgctgtgattatggccagtaccccctagaggtgcttggtaagaccaaggttcccctttttttttttctgaggcggctgcaccctggggacctacccagagggctttggaggcacatgatggcctgcggacctcaagcgggctcctctttcctggggcgccatcccccatgctctgagctcccgctctccccagcctctcaggccccatgggcagggctcgggcctcctactctgggccctgcagtccacactgggcctggctcttcaggggctggggaggtgggtgagttggcacttgcctaatttggctcaggggtctcagctggaggaatgtctgaaattgtgacccagcagggggtggggcgagtggatttcctggctgatgttggcaccgtcaggacacagtggggtcctggagtcccagcccagggaagtgagaggcgattctagtgtcacctgagacagagaggcctgggctggggcaaaggccgagtgtccctgggagcatacggggcactggcctggcactcgggaaactggcctggctgaccagcaactgtactagcctctgtgggccaccctccctcccgcaggtgggccctgcctggttcctgagcccattgctctcctctgtagggtttcttcaaagtcctatagccccgcaccacagtcccctgagagggaatggcagcaacaacacgcttcctggctcctacccgaatctcaccgagtcatgctccttgtgaaatgggtccaggaatcggccatttttgagcaagctcatgcactgattctcaatgattctgaagtttggcccgagtaaaccctgcggacaaccaggggttcgcatccgagactggcacacccgcttcctccgctagatccgagtgggtctagcctgtaacaaatgtaaacaggaggctggggcggtggctcacgcctgtaatctcagcacactgggaggccaaggtgggaggatcgcttgagccaaggagtttgagtccagcctgggcaacacaggaagacccccatctctaaaaaaaaaaaaaaaaaaaattagctggatgtggtggcgcacgcctatagtcccacctacttggggaggctgaggtgggaggatcacctgagctcaagaggttgagggtgtagtgagctatgatagtgccactgcacgccagccgaggtgatagaatgagaccgtctcttaaaaaaacaaacaaacaacagaaaaaaacccaaagtgtaaacaggagccattgaccatcctggacaaagaacggtttctgcgccatcactggctcaggataggccttgctaaggaagtaaggggcccaggctccttccggaaggcactagaacatccccagggagcccgcaggcaagtgcagggggcacctctgtggtttcccctctgggtcttgagtggggcaggcccggcaggctggtgtcccacggcggggggacagggcctagagtgtggacagtgagtccaaaaatgggcacgctcagtgtgtttactgctatgaaaaatgagaccaggcctgagaggcttgtggcttcgctgccacctctgttcctcctcgtggatcggaaagacaggccagagcctaaggcagaaaccagcttgtattggttaccaggagtgaggaaaagccgggcattacaatccgttaactgtgagcttcagtgtctccaaggagaggagatgtatattttaaagacattctttctgtctgatttcaactaaggtttgggctatacgaccagacaaacagtgtgattattcccagcttttcgtttctaaagtgagcacgcgtctttgtcttcctgcacccctcactctggcgcaggcccagcgatgctctgagctcctgcgggcggggaagtaggtttttaaaggccacgtgagctgacattagtaccttctgtgtgaatgagaacaaaacatttgggactgaatatactgcaatgtacacattcataagaaacgttctaataacaattagcgcacaaaactattggtataaacatttttccaaaaagagaaaactattgcatttcgttagaaatcgcgtcctgggccgaggctcgtctttcttctctgcagttggtttggggacagaactccagcacgcagctgtccaactgcagcggctacgtgtttccatggagacaaacttggtgtctcaagttcagggcttcgaaagtcccgaatatttgtttgtcccgagagaagagttttgactttgaagaggtccaggtgggactcgctgggggtggggtgctccgggattagttcagagggaggtgttctggaagactccgtggagcgggacgcaggcactgctgtttggacgacacgcgggatggctgctttctgaagttgtggctgtgacactgaccctgttggacaaactccttccacagccagtggcttgatggtgacggtgaacttggacagagtcccacatccttcctgctgctgataaaacttctggttttgattttttgaaagacactgctgtgtcctggcacgagcgagcccgtttctgtggcttgttctttttcgagctgcggatctgccgggacacagcgattgtcagctgcccctcaagtcctttggcatctggagatgggttcctgcagcacagccggcctcccgcctcggggcatccggcagggaggtctggatctaaaaggccacagggcgctgcgcccagctgggtccctcccacatggtgctaccagacaagggcactccactttccattcctgaggggactccagggacgctggcgagctctgtgcctccccagcggtggcaggtaggaggggagaggccgtccctttctagtcgggctctgccaggtttttttaatttttaaaatcatggtgaaaattggttccagttgagtgcagaggccagtgctctcagcacagccctttcagctcttaaagggactggggccaaagtccagggttccagcagaggagggtttgtccagaataaggaacccatggtctggtggggccctggtggctgcgcagggacctggggacccagagcacagctacagccagtgggagccctggcctgggcttctgtagcttcaacaactgctttccttcttgaacactgaccccgggagcccccgcttgagtcaaagtaaacatcacatcatctaagaggcactaatttggtggagccggtgaaatccaggttcccagagtgaccaggcggcatcttttggaacctcgaggaggcgccggccggggctgctagatgccctgcagggagtggttggggtcactgcgctcccgctttaccaggggctcacccaggctgcgggcgtctgggcccgcctcgctgccacgctgctcatcgcccatgtcatctgcggagggaggggtagggtcagtgtccatcatcaggagggcacgagagggagagaaggaagtgcacgttccgagaactgctccggcacgccaggcagggcaccgaggatacatggcagcctgtggaccccacctcggcctctgctccaggctgacctgtcctccccacctgccgttacccagaggtgcccccagctcgggccaggcgaaagagcctctgccctgtgcctccctttcccagcgccgacgggcctggggcctgctccccacagggctggggcctctggggtcctcccacccgcatgggacagagacggggcccgggggtccctctggcctgcctgtcccactctcctgctgggcgtgggcgcaggagaccaggggctgcctagtctgggcctggtgctgaggtccctgggcagcggctacccagaggccagcggcagtctgagccccagccgagccagtctgcagtgtcacctgctgctcaggcatcacccactgtccggatgacagatcccagggccctcaccccccaaggggctgcccgcatttccacctgttcatcatgagatggggcagacaggccacggccaggagtaccaccctcctgggagggtcgtggtgggaaagccgcagacgcacctacctttgtcgagcagcgtcagcgacagagaggcgagatcgttgaactgaaagagaaacctggagtcaggggcgcctgcagaggggcggcagttgctgtttgggggctcgggggatgccggcccaaccttgccttgagccacgtcctccattcacagtgaagcagctggggcctgccctgaaatgtggctctgatgctgccaggtgtctgggtgggtccctgtgccctgtccaggccgcctctgggagctgctgggggtggagggtgctgactactcggggcagcgaggggacagcagctggctcccaaagtcccctgggtgcggctgctccgggttttaaggtggcatggaagagccgtgggccaaattatctttgctccctgaagtctgtacacagcaggaaaaccactccttggctgccccaaagcccggcgttcacgccaatgtgcagagaacaggcggcttccacagtttctgtacacgttgcggggccctggccaccgactcttagagtgctgtggcttctgggtagtaagagtgcagggaccccgccattcatcaagcatcatctcgtttcttcctggaggccatcccacgcagcccagcaagtccactccaaggtgtggaccccgaagaactgaacacaggagtgcacacaaacacccgcccacacacgcccacgcagccccgttcacgacggccacagagagggagcgaccgtgcagcacggagggacgagcggtcagcacagcgcggccagccacgcaccggaacacaactcagccaggagaggaaccaggctttgacccgggccgcagcgcggatgtcatgttccgtgacagacgccggacacaaaaggccacacagtgtgtgatcccatttctatgaagtgtccaggacaggccgatccacagaggcaggagggggctgcgtgggtgctgtgctgcaggaggagcttgggaatgactgctcctggggacggggtttccttttggggtgacggaatgttctggaactggacagaggtgccagctgcacgttgtggatgtgctaagcgccacttgattgtgcgctttcacgtggaaatctctccctatgtgtgtgttaccacaataaacagaaaactctgggtggtgtgtccgaggcctcccctgtgtggcgggacgcccaaggacaacctccttccagagccagcggtgcgatggggactgtgaacttggacagagccccaaatccttcccagtgctgataaaacttgtggttttgatgttttgagacactgctgtgtcctggcacgggtgggcccgtttctgtggcttgttctttatcgagctgcagctctgtccgggcggcagagcagtgggacctgcgagtgtcctctctctgggctgctcagagcacaccgccctctccccacaggcccggccaagccccggccgtcccacccaggagggtcctcacctctcccatcacagcgatcggcgtctctccggtggcctccgcgacgcggtgctccaccaggtagaacatgtactcgtcgtagagcaggcggatgaggtggaaggagccgaagctggcagcgctgcgcagggtcaggtcccggatcaccatggagctggggacaagcggacagaggctggggaccctcaggggagcatggaacccgggccccaggccagacttcatggcagcaacacaccccctgctctacgttccctggggaacccagaggctgagtgatcctaagacgtgcaggcctacgcgggggctgacgggctgccgagaccctgggcccacgtgacggacaggtggggccggcctgcgcgctcagttccagagaccacctggggaacaggagagggagatgggcagtcagccccaaagcgacaggctgcgggaaacaactgtggctggtgctagcgcaggcgctagatgggatcttagctggtgagtctttctagtgacatttcggactccgaatcagagcacaggctggcagctggtgcctgtctccccagcaggaggcgcctttccccaccttccccgtatccttgccacctcccgccattcctcagcctgtggtttcaggcacctaaaaacaagacaaaaagccagggtgctttagtctctgtcagcgaaagcaggggtttcagagacttcagcccagatccagtccgcgtccagccctcagcctgtgtgctgacaatgctttacattttgaaatggttggaaaaagtcaaaagaataattatattcggtggcacgtggaaattacatgaaattcacattttggtgtccacagacagtttcactggcacgcgtcatgcccgttcctatgttgtctttcctaggatggctgcaaatactacctggttctttctgggagaggcggcccctgacctaaaggatcagtataagaccaaagggggctaggcacggtcgctcacacctgtaatcccagcactttgggaggccagggcgggcagatcacttggggtcaggagttctagaccagcctggccaacatggtgaaacgccatctctactaagaatacaaaaattagtgaggcatggtggcacatgcctgtaatcccagctactcgggaggctaaggcaggaaaattgcttgaacctgggaggcggaggctgcagtgagccgagatcatgtcgctgcactctagcctgggtgacagagcaacactccatctcaaaaaaaaagaatgaagtggaacaatgtctcagtcctcctataagacctaaaggacttatatacagtggcacctgattaaaaactttggcctacaagccaggcggcccccaatgcccaactgccccggctcgaagtatactttcataaactctgttacgtctaatcggtatcgagcgataaaaagaagacacaggcttgagaaaggcaaagacagccgcactatgaagaccaccaaagctgtctatccttaagtgtcaagcatagctgcaaagcccccagccccctcctgttcctccgggcccacccaggttggcttccaagccccctttccccaaaggcctcccccacgcagatgaggtgctggcactctgcaaccagcttccccacagccccggtgtctggtgcgatgcttcagtccaaagtatttccagaacatcgcctgcggtcaccccggtatctctgggttcccaaatgggctcgcagctcccagagagtaggagcatcggccgaccaccaccaagggaggcccagccagagcttggggatgaccagccaaggcctcagtccacatgctaccattttctagtgggtgctacagaaataaatcccgtaaacctaatttttattttttatgactgcactgcacgtgcataagaatgaagtcagaccaggcgtggtggctcatgactggaatcgcagcactttgggaggctgaggcaggtggatcacctgaggtcaggagtttgagagcagcccggccaacatggcaaaaccccgtctctactaaaaatacaaaaatcagccaggcctggtggtgggcacctgtaatcccagctattcaggaggctgaggcacgagaagtgcttgaacccgggaaggggaggttgcagtgagccgagatcgcaccattgcactccagcctggtgacagagcgagactctgtctcaaaaaacaagcaaacaagagaatgaagtggaacagtgtctcggtctcccttgtgaagagcacccccaccttgcagacgtgaccccgatcccctccagctctgagctgtgctcttctctggctggcaggcacctcagtcctgcgctcactctgctcttctcaattcttccgcttgcaaccttccctctgtccatggagactggcatcggcatccctacgctgtctcttcccttgctcttcctccctcattatcccagtgtggctttattgtaatttctggctacactggtgtttctgttatgtggcagtggtgtgctaggtccatggcagagccgcatagtctattaggcgtgtggttcctctcattcattcactgagccagcatttaaacagaagtgaggtcccggcactcgggtagcgtgcctgatcatgcaggagacagacaacagacaagtgaacagatgacaggtgacggtcaatgccaggagaaaggcagggcatggggcatgcaaagtgggaaagaatgggccgtcttatttacagaggctgggggtgagggatttctctgcggatgatgggtttctctgtgtggctgtctgggggaaagatgttccaggcaaggggggcaggtgcaaaggccctgaggcagcgtggccaggggagtgtgtaaggagacagctgagaacaggggtgctggctggccagctgaggggtcagcaaacttgttcttattttttttttttttcttgagatggagtttggctcctgttgcccaggctggagtgaaatagcacggtcttggctcattgcaacctctgcctcccggattcaagtgattctcctgctgcagcctcccaagtagctgggatttcaggtgcccaccaccacgcctgactaatttttatatttttagtagagatggggtttcgccatgttggccagtctggtcttgaacttctgaccccaagtgatccacctgcctcagcctcccaaagtgtggggattacaggcatgagccactgcgcccggccaggcaaactcgttttcacgcttgccagatagtaaatattttcagctttgtagccaacagtcaaactgttttgtttgcattgacagctgtagctgatctgtgaattaatgcatgtggctgaggttccaataaaactttatttgcacaatgggctggggcagtgatatggtttggctctgtgtccccacccaaatctcaccttgaattgtaatgatccccatgtgttgtgggagggacctggtgggaggtaattgaatcatggagacagatgtttcctgtgctgttctcttgagagtgaataagtctcatgagatgtgatggttttataaaggcgagttcccctgcacatgctctcttgcctgccgccatggaagatgtgcctttgctcttccttggccttccgccatgcttgtgaggcctccccagccaggtggaactgtgagtccattcaacctatttttctttataaattacccagtgttgggtatgtctgtatcagcagcatgagaatggactaataatacaggtggggataacaatttggccctgtggccatagctcatccatgcgctgggtcacgtggggcctgtcagccacagaacagctttgttttttcctggggtaataactggctctttttttaaaaatgcacattttccatgtactcagggagactaaaactccttgacagaactgcaggaggcatcttggtgcctttcctggggacaatccctctggaagccttggctcccctgccctggtctgcacaggttaggtctgtagcttggaaatgatttcccttcagagctctcaggacatcgctctactgccttctgggtttctgcacattgttcggaagtctaatgctgctcccatccccagcctgtttctttctctctggaagcttttatggttgtttctcaaacttggtgtttcgatatttcaccaggagcctccttgtgcccttcagttctgagatagctttgttccccccttagagatggggtcttgctctgtcactcaggctagggtacagtggtgcaatcttggctcactgcagcctggaccgcctgggctcaaggatccttccacctcagcctcacaagtatctgggaccacaggcacatgccaccacgtccagctaagtttttttactttttgtagaggtcctgatattttccccagggtcgtctcaaatttctggtctcaagccatcctcctgccttggcctcccaaagtggtgggattataagtatgagccaccatgcccagccctcagtgatgatttctgtctgcagaacttgcaacttagtatttaggccacggtggccttctgggcctgcccctgggagccgctggtcatgagtgaggcccccagccaggtagttgttttttgcgggttcagacactgctgcaactctgctgagccctgttttgctctgagctcaccagccgagccccctaccctctagaagtttctctcagagccccccacccgccagaattctctcggaggtctggtgggactaacctgtaaaaggaccatttcagcaagaactgccgggcggccttggggaagctggggctgccggcatgctgcttcaggacctgggtgaccacactgtccagccagctggcccactggtccagggagctctgctgctgcagggtcagcttgaaatcctgctccagccgctgcaccacactctcctcgcactggcacacccacgaggcctgctcctgtgggcagggcagaggccagtgtcagcaatgtggacccccagccacggcagccctccctggacctagccatgctcagggcgggacatcgtgctgtgcttgagccttctcgcccttgaccttgacagctgcaagccaagtcctgtgtctcccgtcacaggggcagaatagagagctgagggggatcgtacccggcttccggggactcatacccaggtctttctggatcaaagctcatgctatatgaggtctttgtttagctttgtttcaaaggggtcacttctaaatgtatgtgtgtgcgtttatttatttaatggatagacgcagggcctgaaataagcatagctcggaagctgctgtgggccgacactttgccaagcccaggggacagagccaggaaaatggccacagggaggtcaacgtggtgccacgatcctggaagctgggggcctttgtgaggaaaatgagcagaagtgttggccacagcgcctggacgccagagggccctgagagatgatggagtggagagagctgggggctgtgggtgggctttggcctgggacccgtgtcatgcaacagaaccgtggccaggctcggggcaggggccaggttgtgccacgggctccacttggtgggtttgctggttttgctggagggcgggaagcccgggccctggggacggtgtggaggaagtcacctgcacgttggcaaagtccacgcggttgaggtcgctgagcatctggttgatctgggacgtgttctgcagcaccgcccgggccgcctgcgccaggtggttgagggacgtgtagcgccgcagcgtctgggcgaaggcactgacgacgcccacctgtaagccagggctcgtggtgagcaggggttcgcagggagagcctgttccgctgcgctccttgcaggggtgtgtgggctcagggacaacacagggaggagggagcaggaaacagcaacctgggcagggaagagggaacctcctgctattcttaaggacccagtgtgtgagaatcagtgaagaggagacctcgccggcacatcacacacgtcgctaactgaggcctgcgtgctgctgagttagaattcacaactgtcgccatgcccacttctagagtccctgtggttctctggaggggctgttgagaccacagactcctgagtgctacaggatcagacttttagtgggtgtggcctgggaatcttattttttttaagagatggggtcttgcttgttgttgcccaggctggtctcaaactcgtggcatcaaatgatcctccagtctctgtctcccaaagtgctgggattacaggtgtgagccactgcaccggccctgaatgtgactttttaacaatgacctgatcaatgcttgcatcactgcctaacagatcaattccgaagagcaggcgggtgccctgcagctgcctcctctcacccaagagcccttcaggaaatgctcatgatggctgggtgaggtggctcacacctgtaatcccggtactttgggaggccaaggcaggtggatcgcctgaggtcaggagttcgagaccagcctggccaacatggcgaaaccctgtctctactaaaaatacaaaaaaattagccaggtgtggtggcgggcacctgtaatcccagctattcgggaggctgaggcaggagaatcgcttgaacccgggaggcagacg[138 bp omitted]tcggccaaggttctacatttcaaattcgactgatttgtggccaagattgcagcaataagggtcacagcaaggagattaaatttcccgaataagatgagcacagaaacacgcaatctgttctgaattgacccaaagatgtgacatcaaatgacatcttctgttgttccccttcctgccagcactgacgcgtcaccggcagtgtgctcagggcttcctgaagggatcggttactctcatgacgcagggaagaagccagcgctctctgggacacagtggtcctcatgctgtcctggactggagcccctcccagccatcgttggggagcccaggccccaccccggacgcaccttggtctggatgacctgttgtgggaagtcactcatggcatttgtcaaccagccttccaagctcttggcaaagttacggatggcctgtgtcaaggtacctgggggatacagaccatgatattaccagggagaaaggcagtgactggaccctggaaatcagcattcagtgtaagagctggcccaagtgcgatgaaaatgaccaccatgaagaacgagccacacaggcgacggggaaccgaggacacttagaaacgggaagaaccaggcatggcccagcgctgctggtcaccacccactgcctatgcgggtctcacaggggcgattctgccccaggggacactgggcaatgtctggggacgttaatggtggtcatgactgcagggtgcctcaggcatggagtgggtggaggctagggatgctcctcagcaccccacagtgcccaggagggccccaccccagacaacgatccagccccagatatcaacagtgccaagggaaagaggccttgacacaaacacacacacacacgtaaatacattctaccaacttcctaatttattttaaagtgggttagaataagaagcaaatgatcagactgttaaaaaaaaaaaaaaccaaaaaacaaaaacagaaaaaggccaggtgtggtggctgacgcctgtagtcccagcactttgggaggccgaggtgggcggatcacctgaggtccggagttcgagaccagcctggccaacatggtgaaaccctatctctactaaaaatacaaaaatgatctggacgtggcggtgggtgcctgtagtcccagctatttgggaggctgaggcaggagaatcacttgaacccaggaggcaaagactgcagtgagcctcctgcaatccagcctgagtgacaagagcaaaactctgtcttaaaaaaaaccagaaaaatattttaaaatgcaaaaggaaagataccccaaactcccaccataacatagaaactcagacgaggcattgccctgaacagttttcaggcagacaggcaaggccaggccaaatgagaaatgcaatacttttgctgtttcccatcttccagcaaagggagcatagagtttactcaacaggacggagagctgcctggtactaacgggcatgcatatttgtggatggcctgaggggcacggtccatgggcccggatgtttgtggatggactgcggggcatggcctgtggtcctgatgctgtgatttatgaagagaggcctctgtgcccagcttccttgacgacccccagggttttggggagcttggcacgggcctggcccgagggctccctcgtggtgggtgctgtcattgcctcaggagctggaggccctgggaggtctccaagggcacgagtgatctctgccgtgggcctagcttccttcctcactgtgcctgtcactctctccccaccccaccaagtcctgtgggaaatcacagggtggggcgctggggtgtaaatgtctcctggaatcccacggtgctgggaagtggggtctggctgggggttaaaggtcagcctctaccctaacaggctgcaggagtccagggccatgtcccagcttcttcttctgagtttatgtccctgcccctcctacaggggtggcactcaggatgtgtcacagtggggcttaagggaggctggaggaaggtggctggtggtcgtctgcaagaccagggtgcgcagcaaccccacatggccctgggccaaggcctcccgcacagtgacggctccagggctgcacacaggctactcccagaggccggcctgcatgcccccagtgaaccttctagaaagcaccgagcccagcccagctactcttggctgtgtcctgacagcaggtagagctcaccagagccactgtgaccttcccctcgagtcagagacaaggacaaataacgcatgccagaggggacacattctacggcccacagcggctctcacttagggattttttttgagacagggtcttgctctgttgcccaggctggagtgcagtggtgcgatcatagcttactgcagcctcgacctcttgggctcaggtgatcctcctgcctcagcctcctgggtcgctggactgcaggcatgcaacaccacaccagctaatttttgtattttttttagaaatggggtctcactatgttgcccaggctggtctcaaactcctgggctcaagtgatccttctgcttc[133 bp omitted]ggttaaagctattctcctggctcggcctccctagtagctgggactacaggcgtgtgccaccatgcccggctaaatctttgtatttttagtagagatggttttcagcatgttggtcacactggtctcaaactcctgacctcaaatgatctgcccgcctcagcctcccaaagtgctgggattacagacgtgagcaaccttgcctggccccagataaatttttttttttttttttagagacagggtctcactatgctgcccaggctggtctcaaactcctgggctcagcgatttgtctgcctcagcctcccatagtgtggggatcactggcatgagccaccgcgcccggccacttttgggttttctgtgaaagcgatggtctgaggtggctgaagacgtacatgtaagaaaggacagaggaggcaggaagagaggatggagcagcgccgggcggggccgtgggtcacttactggggaccggcctcagcacgtcggggatgagaatctccaccagcgcctggtagaggatgtggtcgcagctcctcatccacctgaggatggggtcgcactgacacagggagataagcttgtccttgggcaggacggcgccctcggggtcttcgtcactgtggagggaggggggacaggtgagctgtggcctggcccaggtgggctcactcagccacgggagcgagcagagagccgggctgcgggacttttgcccaacagtggggctggggttttgctccccatccctgagcctcgatgggtcccctccctccatgttgctcccggcgcctccgtgtttccccctgtccctcactgtccacgctgtccctcccctgccagtggtcatactgtcatactgcgtctcactgcagctatgggttggggtcacttctacttgggattgcatcatggtcacctctaaaatcctccctattcaaacagtctgaccctgcaaaggggcggatggcaatgtgaatttcaagtcaactctaccaagtctaaaaattacagggatggaggcagaggggtctgaaccctgattcttggagagctgaggctttcgtttgtgggttacctgtggacgtcagcagggggttaagtctggggtggctgtgaacccagccagggtgtggcagtcacctggcaggaagagaggtggggccgtcgctggaggaggccttagagttccagaaggagagccacagcttctcgatgtagtggaactggaggttcatcaccacatctacagttgcctaggaatgaagggaccggtgagacagacgggtgcgtgcgcccatcacgtgcactcagcacacgtcaagtgagcagccgtgatccgggctacagcggggtgccctggaatcccaagggaggccacagagaggagaggagcaggcgatggacatggatgcggaggggctgctgcttcagagaggatgcttgttggggggctcggggctccagctcctcagcgtcacccggggacgcctggcctgagcgctggcggttcccgggagggacacgcaggagctgcctgcctgggctggggcggtcacctcgcagtgccgtctgtacaccagctgcagggccttgacgtcgtgcagtgtgacgccgtcctgcagcaggaagctgcccaggtcgggcgctgggaactcggggaagacgtgggagacatctgggggaggaacacgggaacatcagaaatggcgaggctcttaggacaccgtggacaactggaaggccacggtggatgggggcccagaaacagatgttctgccccaccccatgcagtcagggaatttgttttttctttctttttctttttcttttttttttttttggagacagggccttgctctgttgcccaggctggagtgcagtggcacgatctcggttcactgcaacctccagctcctgggatcaagcgattcttctgcttcaaccgcccgagtaactgggattacaggtgggcgccacgatgccagctaatttttgcattttttagtagagacaggatttcgccttgttttggccaggctggtctcgaactcctgacctcaggtgatctgcccacctcggcctcccagaatgctgggattacaggcgtgagccaccatgcccggccattttttttttttttttttttgagatggagtctcgctctgtcacccaggctggagtgcagtggcacgatcttggcttactgcaacctcctcctcctgggttcaagtgattctcctgtctcagcctcttgagtatttgggattacaggcacgtgccaccacgcctggctaagtttgtattttttttggtagagatggggtttcgccatgttggccaagttggtctcaaactcccaacctcaagtgatctgcctgccttggcttctcaaagtgctgggatggcaggcgtgagccaccgtgcccagtacagtcagggaatttctaagcatcagttttctcaggtagaaaatggagaggatattgtcacctcccaggaacattaaatatgcagacacagagaaagccctgagcccaggccctggcacacagcaagtacccacagagccagctcagggcagcacatctcggggagaaggccagccacggtgtccctgcagtgacctcctggagatgggcctgaccccacctcaatctctgccgaagactcaacccaggagggttctgtttgggctcaaaaaagatcataaacgacatggaagccactgagtgtgtacagagcccacctgaatcatgacatgccagtgagccttccttggccgccccccacccccctgccctccctcatggcaggctctgagttagggccttcccggggcagagatggcaccaccactaagccagctggggaagaacgctgtcccttgagcagcccccagggaagaggccaagactgcctcatgttggggaaccagaagcaccccaaaagctccaggcaagaaggaagaaagcccagatagcaggcaaatcctggtgcaccctgagtagagaatatctagcgttctttctttttttttttctttaattttaaaggcagagtctcgctctgtcacccaggttggagagtagtggcgtgatcatggctcactgcagcctcgaacttctgggctcaagtgatcctcctgcctcagcctcctgagtaggtgggaccacaggagcttgctactatgcctggctaattttttaagtttttagtatgttgcctaggctggtcttgaactcctgagctcaagtgatcctcccgccttggcctcccaaggtgttgggatcacgggcatgagccgcctgtcctctagtgttctttctgatggtcatttgattttattttctcatttttctgatggtcattttatatattaatttttttggcatgtgctgattattctaaagtctcagggatgtcagaaagaaggtttatcgaaaactttctatttgtccgaaaaggtgtctcgtaagaaaactgtcggaagcagacgcttagacaccactggttctgctggtgttgaaacccaggagtgtggcgagcagatgggagccccgcccccgggcctgaccgggcctctcacctatgtactgctggtggtgctggctctgcacggccatggtctgttccggagtgctgtgcaggccgctgtgggagccgctgtccccgaggctgtccgtcttctgggctggccggtacctaggccaggaacacgcataccatcatgaggcccagcagccctgctgcgggtgggcccaaagactggggggctgggcaggattcagtcaggcatgtgtgtgtgatgtttacaagttgcggtcaaatacacataacacaaaagctaccatcggaaccatcttgagtgcacagctcagcagcattaagcacattcactggttgtgcaaccctcaccgtcgtcatctccagaacttgatcatcttcccacactgaagctctgtctccataaaacgctcactccccatccctgtccccagcccctggcacccctgatctgacttcccgtctctgtgaatctgacgactctagggacctcctaggagtggggtcacacaggatttgtccttttgcaactggtctctctcactgagcgttatgtcctcaaggtccaccgagttgtagcctgtgttggaatttcctcctttttaaggctgaataatattccatcatatggatgaaccacagtttgttaatggacacttgagaaaatagatatatattttccccctaacatttctctcttagaaaaaaaagtgaaattcttggccgggcgcaggggctcacgcctgtaatcccagtgctttgggaggccgaggcaggtggatcatctgaggtcgggagttcgagaccagcctgaccaacatggagtaaccccgtctctactaaaaatacaaaattagctgggcgtggtggcgcatgcctttaatcccagcgactcaggaggctgaggcaggagaatcacttgaacctgggaggcagaggttgcagtgagccgagttcacgccattgcactccagcctgggcgacaaaagcgaaactcggtctcaaaaaaaataaataaattaattaaaataaaataaaataaaataaaataaaagggagattctttgcgtgaatcacaaacatcttattattggtgcaatcttagaagttctgagactttcattttgagccagatggtggtggccagcctgtgcaggcagtgctgagaaacactcagcactttccaggcgctggactcctcagggcccggtgtgtggtgtggtgggggcagggagggagccggcttgagctggagcatctccagcggacctccctcctcaaatacgaagcggggccaggcctacagggaggcgggagaccatgctggcgaggtgtgtgtaaaccacctggctcagggcaggccgtgggcatcacacagacacaggctcaggctgtggcttccaaatgcaaatggcatcagcctgtccccctgaaatgtgtgtcgctgctcctaaaatgacacactgcctggagcacaggttcacagctgtctgccaggggcccaaattgaacaacagcagtgagctccagagtccatgtctgcagacaacgaggtacagaaggaatgctctggaaactctctcctggaacctccaactcctgggagtggctgtgtggtcaggagtcaatgggttacgcagagcagctggaatgggtttttgagccacacacatacacgggtggctctgtgcagagggtccagcaccaggtgtaaaggtgccacgtggggctattgcaatgtggcccctgccctcagggggggcacttgtggaggcacactgggaggcagtgatatttgaatgggccctaaaccaggggccagcaaactatggcctgagggccaattctgctgtttgtttttataaataaagttttactggcacacagccatgcccatcatcctcatgctgtctgtggctgctttcaggatgtagccaaattgaacagtcatgacagagactgtctggcctgcaaggctaagatatttgctctctggctctttacaggaaaggtttgctggctcctgccttagaagatgagaaagtttgtgatggatggagaagaggatcttccagaaaataaccagggctttccagccactggatccaaaggtgaagaagaagtcgtgacttgagcacatctgcttctttctcctggcttcttgggttatttgcagtgtcctctctctctttacttcctaagctttaaaaattaaaggtctgtgattccaactatatgacactggggaacggggaaactgtggggatggcagaaggattagaggttgctgcagactggggtggggagggaaagctgggtaggcagaacatggaggatgtgtaggactgtgaaaggactctgcgtgacactgtgatgggggacacatgtcattataggtttgtccaaactgtcgaatgtacaacaccaagagtgagccctgatgttgactgtggactctggggggtgatgctggctccgcggagggtcacgggtcatgagcaatgcaccgctgtgtgggggaggtgaatggtgggagaggcggtggggagcggggctgggggtgtagaacaactctctgtactttctactcaattttgctgtgaacctagaatggctctaaaaaatgaagtctgttaaaaacagttttaaacggttttaaaaaaagtctgaaaagttagctggaggaggttgcatcccagcctcctgtgtctcctgctagactcacctcagtctcagcagagggggataccttggctttcccaggatgctggagactggggagttatgatgagtttgtttcgtgttggagaaacacccacccctccatgctccaggggagagccagctcctcccagctcggcccggcacccacctgggcttctggtgcatgggctgctgccgcatggccatgtactgcgtgtcctcctgcagccggttcagtggtgagtccggcttcagacgaatcccatagtaatggtacttcgagttgcccctggaaaccaaacatcccagggtcagctccctttgcagatgtcctgaacaacaagacaggttgggattctttttctttctttcttcttttttttttttgagacagaatctcattctgtcgcccaggctggagtacagcagtgccatctcggctcactgcaatctccgcctcccgggtttaagagattctcctgcctcagcctcccaagtagctgggatgacaggcgtgagccataatgcctagcttatttttgtatttttagtggagacggggttttgccat[137 bp omitted]ctctgtcacccaggctggagtgcagttgtgcaatcacagctcactatcaggaggtcactaccaggaggtcactatcacttgacctcctgggatcaagtgatcctcctgcctcagcctctgagtagctgggacagctggcgtgtgccaacacactcggatggtagaagtgatcctcctgctgcagcctctgagtagctgacgtgtgccaccacactcggatcttgacctttcactttggcctctctggttcagcatttcctgaactgtgtgaggaatgtgatcaaggaattctgtacataatgccgttgtcatagagagtcctctctcacaggctagtataataaaggctcggacaagtcctgtgctgagaacaccaggtcagctttgttgagctccacatggcttatctccattattattaccattattattaacaactcttccccacccccttcaatcatctagtaacacgttttggaataaggcactgtttgggaaccattacattagtttattacgggagaatgatgatcagagggctttaaacaatttagttcagaaaacagctcacagagtccttacaggagggaagcattaacccacagacatggctgtggagacacccagctcacaggatgccatttctccagagctggcaacagggacatgcaggaagcacctgggtcctttctttttctttctttctttttctcttattattatatttttgagacagtctcactctgttgcccaggctggagtgcagtagtgcgatctcggctcactgcaacctccctctctcccaggttcaagaaattctccagcctcagcctccccgattagctgggattacaggtatgtgacaccatgcctggctaatttttttgtatttttagtagggacggggattcaccatgttggccaggctgattttgaactcctgacctcaagtgatcctcctgccttggcctcccaatgtgctaggattacaggcgtgagcaaccatgcccggcccttcttttcctttttaaatttcattgcaatagcagacagcctgggccctttctagatgaggtacatgtttagccaggtgctcggaggagggaaaacggggggaaatcagccttaatcctgaagccagcagctgggatactctgcaggggaggcccctccaggagcaggggctgtgtccccagagaccaggcttccctgtggcttcctcccgcttctgtccctcctctacgcatccacattccctaaggacattccctgtgaaggatgaaaaagtgtcagagaataagggactctggtcctcgtggatccaccgccacgccgtttatagacagccaggacaccggctttgagagcacgtgagtcagccccaaccccacaaaagcagatgccaagcctcgctggccacaggatcacagcctcagcaggcagcagcctactgcactctctgggccaccagctttgggttggaggtgctgctgtttctttctgttagaggagagttggcataattgcctgtgataagtctgtggcctgtgatgtcccggggctgccataggccaagagaaggcggggtggattggtccaggtacagcaaaagacaccaagaggccgggcacagtgactcacacctgtaatcccagaactttgggaggctgaggcaggcagatcacttgaggccaagagtttgagaccagcctggccaccatgtcgaaaccctgtctctactaaaaatataaaaattagccaggcgtgctggtgggggcccgtaaatcccagctacttgggaggctgaggcaggagaattggttgaacccaggaggtggaggctgcagtgagccgagatgacgccactgcactccagcctgggtgacagagcaaggctgtgtctcaaaaacaaaacactgagaaatggtaaatccagctctgctggataaaccagaggctacattttgtttgtttgtttgtttgacacagggtcttgctctgtcacccaggctggagtgcagtggtgcaatcgtggctcaccgcagcctcaacctcctgggctcaagtgctcctcccctctcagtctcccaaataggtgaaattacaggtgtgcaaatacgtgtgcaccactatgcctggctaatttttaatttttttgtagagatgaggtcttgctatgttgcccaggctggtcttgaactcctagtctcaagtgatcctcttgcctcggcctcccaaactgttgggatttcaggtgtgcaccaccacacctggcccagaggctgctctaaaacaaaaaaagaaaagtattgtttgggaaatttcaaaaggagagagaaaaccagagtgatccccacgtcctatcaccggcttctaaagccgacaccgtgggctacacctggccacagccaaggctgccgccaattgaaagtaactgcaagcactccagaggtggctgcgaatcaggccacctggaaaggaggaggaagcctcgcattttcccaaaagctccatttcttgggaaaggaagaggaagaacaggtgggctggggatcgtctacccacctggtgcccagccgccgcgttctcagccccataaacacagaacggatcagtttcccgaaggaggcggcgttcactgggtctagcttgtgctcctggcagtgccgaaggtagtggttgtaaagagaacttctggggagactcacaccttccgctgtttcataattatccaacagccactggagctgtaaaaagaaagacacgtctgcgtttgtcagaagcctgaggaacgctaacatgccaacgtggactcattaagagaattacttgcgttccctgtgttaccaaatgggatgaggaaatccatcttttctttctttttgaggcggagtcttgctctgtcacccagtctggagtacagtggcgcaatctcggctcactgcagcctctgtctcctgggttcaagcaattttcctccctc[224 bp omitted]agattaatgaatccctcattttcttttgcttattgattctttcatgtttagcctggttttcaggttcctggacttaatttgtaaacatctgggtgtgatcaggaactattagcttctgtcttcagtcccttaaatgaaatacccacacaccacacaggctttaacaccaaatcgctccccaacatacaggaatggagagaaattctgttgctgaacaggaagattgaagaagactcgggggccccacagccctgtgttctgtagtgagcagtgagctaacatgtactgagatcccttattgagggaggtacaaatggaaattcagtaaaatacacaaatgcttatatgcacggttttgtgtctaagtcaaaaggcaggacatagctacttgggaggctgaggtgggaggattgcttgagcccaggaggttgaggctgcagtgagctagggtcgcgccacactgtactccagcctgggcgacagggcaagacttcgtctctttcaaaaaacgaaacaaaacaaaaagatgggctaaatgagtcccgagccaaggactatgcctcgagaggtgaacatccagttagaagggctgcgagaactgtccacacgaagagctcagtccccacactgggcatggacgcaaaggtggcctgcccaccaactgatgccctcacccaggtgccttaaagactgcggcttaattctggtttccacctctccctctgctatcgtctgtcccctgatccagagaggtctgctatgtgaatacaaaaggcttgcactgatgcctgcgatttgcagaaagacaggaattccacgcacagaagcgaggcccgagtccagatcccatgtcaagagcgtcgggggaaaccagctgtctctacctggtcccctttgtgcgaggctgtcagctgctttgtctaggctgagccccgcttccagagctccgaagggctcctgctgcctgggcccttcagagtgggcagtgctgggtcctcagccctcccccaccgggcatgttgggctcctgcacagcccttggcctgggaagcccttgtccctgtgccccgcacaccccacaagacacaaagtaggcgtgtcccctgggaaatatctgtccactcaccacagcgtacccatggcacccccccgccccactgtcacgtttgcctgtctgtttgccccatccccacccccccaactcagcattagaagctggggaggaagaaagcattcatctccctttaattatttatttattgaaatggagtctcactctgtcacccaggctggaggtgcagtggcgcaatcttggcacactgcaacctccacttccaggcttcaagtgattcttctgcctcagcctcctgagtagctggcattataggcatgcaccaccacatctggcttatgttttttgtatttttagtagagatggga[140 bp omitted]cgagccctgcaccagcgaccagcacctcagaaccccttttatctcatctaagacccactcgatccagcctgtcctggcccctccagccctaacaggggttgacccagggccacagtggagtgaggacctgccctgggttctggaacgtttcacaggaggacaaacaggtcaaaggttcaggtgaaggggtgtgtggggcctgaacgcggaggtctcttaagccgaattgcaggtgagctgcggggctgagttccattttaggaagggggaagttaagtcttgggctggagttcagggtagagattgggaccagatgtgttactttggaaccaaagagctgaggacaaaacctccaaggggtgggaagagtcagtcacccagcaggggcactgcccacgtgggtgttgaggatgaagaggagcaaagcgtaagcctcgaagtgtgggtccaacctcacgtcctgcctctggggcaagccaggagggcttcagacctcctgaccacaagctcccctccagctctgctcctgcaggtaagtcccgtggccaaacatccctccttaccaaagggacaggagtggttcctgccacaatccctgagcttggattccggttccctggccgcccctgaatcactcaagtagcctatcacctcctcctcagcaccagggacccctcgccctcttgctaccacaaagtctgcctcctgccgcctgcagggccctgtgtgaagtgcagtgtcccccacccccccgccatgagtgcaggtgatcgttagcagttgccatcgttagcaggtgccaatttcatccgtccagcattgggtgccatgtgcttggctgtgcccataaccacagggagggacccccgccctcttgtcctttgaataaggggcagttaaaacaaaggaccctgagaagggcccggagtggagacttcatctcttcctcacttgcctctttgggaaaagggacatcagagttttcactttccatcaagtcattcacacccttcatcttccgactttctggactggactttttccaatacaatggaggcagtgttgcttttttctcctccaaagtccggctctggcagagtgcttggacccttaagagcttaagagctccggagtcttccctgtatttaatgctatgaatactatgaaccacaaccttgatgttgaagttagtgtgtgagtatgtgtgtgtgtgtgtgtgtgtgtgtgtgtgtgtatatacttttatatacttttttttttttttagagacagggatatatatatatatatatatttagagatagggtctcatcctgtcaccaccccaggctggagcgcagtggtgcaatcatggctcatgcagcctccaactcccgggctcaagtgatcctcctgcctcagcttccagaagtgttgggatgacagtcgggagctgcagtgtgggccctgaagcttttcttcccagtggcttcaccgtccggatttgtcatgtgtgctgattgatttatcgcctgttccccgcagactatgctctccctgagggtggagacggagccaggtttgcccatgtgagcatctgcaggatcctggagatgtctcaagcctggcagcagagaaagactgtccaaggaggtagatggggagcaacagagggtgtctgggtgaagaagccagaggcttcccttggtcattctgaggctgggggcacaggtgccacttcttagactgtcctccacaggcagcaggagccaaggccagtgacaccacatctcaaggagccaaatgacgatgcggattttcaggctaaaactgtgaggccagattttgcgggcggtgagctggaaggagcactggactaggagtcctgagaggttagagtataagactccatccaccaggaggacatactggctcacacataaaaagaaagttttggaacagatgatccttctgctgtttacccccgaacccccaggctatttaagagtagaatcctttgcttgggtaattacgttgacattgacactaaaaggatgcatagttgtcttgacagcaagtccttcttgctcaacatcaagaaaccacagagaagactgaagcggctggaacagtcgcgtctatttcctccctcttctgtgttgatgaacttctgggaggagaatggggttagaaccgaagtatggcttgcagactctgttcagggtctacgcctcaccagcaggctgggagccacttatgcaccgggccttcccatccctcggtgctggagcccacacctggcggcacgtcagactgcggcaagcatcacaggtcagttccgtgaaaccgaccacgagggtccagccgctccaaccacactcgcccacctcccctgctcttgagggctcgggtaccttcatgccaggaaaggcagcagctggacggagtcacctttctggtttgggcatgttctgcagtctgctttgtctgctgatatttgcattctttctgtgtcaatatcaaacacaaataagcagaacgctttccaaggaaatgtacatgtgtacccacatttgccacaatctgtcaggacagcacacttcttgatgaaatggatcaaatcattccttttaaggaaaaaaaatcccgaaatgccagcgcctccctctccccggccccccaacaaaggcctgtggttctgggctctttgcaggcacagcccctgtggacagatatcctcacctgccggtgggaaggcagggatcatgcccacctacctggccccctttgtctcctaagatacttgtttctattcctgggggcaaatttgcctgacactggctcctggtggtgagttagagtctcaccgggccatacactagcagctcgggcagctattccaaccgtccaggtgtgccctgtgttgacataatccgacttggaacatccaccttttcacccattccacaaatatttacgagagctggctctatgccaggccttgtttaggtgctggggatgcaacggcgaataaaagacaaaaacccctgccccctggaagcgtccgttcttgtctggcagagacccacaataaataagtaaaatgaaccgaatgagggctgatgccgagtgccgtcagagaaattcacctgggaaaggggatggggtcgccgccacggagggactggagggaggactgcaacggtatagtaagttgaggtggggtgggggtgtcaggcagggctcactgagaaagtgcccactgagtgaagactcagaggaggtgagggggagcctggggaagagagcttcaggcagagggccccacagtgcaaaggccctggggcaggtccgagcctggtgcattggaggaatagcgaggaggcccgtgtggctggagcacagtgaggagtgggagagagcgggtcctgcagggccttgtgggccattttgacaacactcggttctacttggagggccaaggggagccctggaggcttccaagcagagcagtgtggcgatctgacctgggttttagcaggatcactctggtggctgctgtgagaaggggctggaggctgggtaggggtgggtgctgacggctggctaggaggtggccgaaagaatccacagggacagtggcggctcgggaagtagtcgaagtggaggaggtggggggtgccacctggttctggatctttcttgaaggtgaggttgaagagcatctgggggtgggcatgagaggagcaaggaggcgaggacgcagtggggttgggggccgagcgcctggaagattggctgcccctgcctcagatgggaccgtgggcgggaggcgcaggggttgtgggaggcgcaggggttgttgagggtggaggccacgcactgagctaagacactaatccgaggcaggcaggaattccaagggaaaacagcggcacttctggacagaggccccttctgaggagctgccggctctagcaaccccactgtggcctgcaggacagcacggccatcgtgccaggctacacaggtcaccagctgaaggctaaatgacctttgacaatgtgtgtttcttgatttcaaagcaaaaagtcacataacccaaatacgactcttccacacgcagctctctcccgcagggtgtgcaagtgatgtgtttactttagcagacagcgccacctcatggtgacagagactcggtgaacctgctacggggtcccggtcggctggtagcctgagggcagcccggtggcccccaggggctgaggccgcctcttctgctcaagtcggtggcctgccacacccggtcgggtgaagacatgtttcatccccagccccggctccgtccccttccctctggaagagctaatccccattttcacggcgccatatcatgcccttttccagtttggacactgctagggggcctcctcctccctgggagtttccacgccaggctgaccatcagctggctggaaggttcttccaatgtgcagacctccaggccctgcagaccccctgggtccaagcccctagaggggaggcctgggaagctcctgttgaccggctgggtctggacaatgctgtctcgttttaccaggctcccagcacctgaatacaccttccctcctgagacagcgcagaggagggaaccagctccgcggaacacgtggccagctccgctcagagatgtctgtgaggggttccctaggtgggtttcccacgtcttccaccttctgccctcaaatgctaagctccctggagtgacttttcctccttttttactccctatgttcggcactgacctggccagaaccctgcacacggtagacggtggtctgacgtcaccagctggcagcaaggaagaggcgcacaggccctgctgctggggcgacctgcctggggctgtctgagaagggaggtctgggaggccactgggaaaatgggtctccagggcccagctgctcccacacacttggcttatctgccacagggtcaggctggcaggggaggtggcactgtggctgtgcccccgcctgacctgcagaaggccgctgcccaccacgacctcagtctcagccacaggcagccctggggacaatcgttgcaagggcacgtcaccccgtccatcagcagatcacgtgctttaactcctctcttcctctctggctctcacatttgccaaaacaagatctaagtttattctgcccgtgtgtgtggtgaactttttagaaagatcttattttacttcctttgcttcgagtcaccaagcccggaatcttactgatcacagctcatgacagaaggaaacaactcaacagcgaatcatcagtgagtaaaagaaacgagagattttaccttcagctcgggaatacgaatcttcatcggggaagcgacctgagaaagtctgcctttcggatgaagtgttagaaagcaggaaggatcccagcagccagagacaagcggctcatgcattttcccatagacattttttcttttttttttttgagatggagtctcgctctgtctcccaggctggagtgcagtggcgcaatctcagctcactgcaacctccgtctcccaggttcaagcgattctcctgtctcagcctccagagtagctgggactacaggcatgtgccaccacgcccggctaatatttgtatttttggtagagatggggtttcgtcatgttggtcaggctggtctggaactcctgacctcaagtggtacacccgccttggtctcccaaactgctgggattacaggcgtgagccaccgtgcccagcccattttcccatagacattttaactctcccgtggacttgctgcctgtccaggctctgcacccccatcctgcctgggtcacgcagccctctcgcccagggctgataccctggacccgcatgggtttgcgttcaggctgaagatggcctgatccttgctgaatggggaatggtattctgcacattttcccatgtatgtgctctgagtttaagactgggggctggggagatcctctctccaagcacgtgtggaagactcccttctccctgagttcatctacagggaggatgtcatccagcagtgacagatgacaggatgaccatgtcctacccagcctggagaggggcggggcactgagcaggggtctggcatggtgtttgttttgttttgtcttttttgcttcaagacaatcggcagaaggaaatatttctgccatttcttctagtgaccagccccctgaggcaaagggcagaggcctcgtcaggggctgcggtgagcaggtgaccacacctgtacctaacccataacccaggtttctggacctgtcctacatcactttctgcccccagaatcactcactgccttttgataacgcctcattttacacatcggccagcacagaagtcaggatggaatcacagtgaggacgggagtgaggacgggatcacggtgaggacgggagtgaggacgggatcacggtgaggacgggagtgaggacgggatcacggtgaggacgggagtgaggacgggatcacggtgaggacgggagtgaggacgggatcacggtgaggacgggagtgaggacgggatcacggtgaggacgggagtcaggacgggatcacggtgaggacgggagtcaggacgggatcacggtgaggacgggagtcaggacgggatcacggtgatgactggggtccactgaaggggacttcttctctgatgtctgaattctcaagagaatgtcagagcccagtttaagtgctagagagcaactactagaaggacattctgacttcgatggcccgtcccagtgttaagatgccgaacacatttccagctatgtgcaaaaccgaatcaagagcgtttggggagaagtgaaagcgatgagtctgagggggccagagctttccttctctgttgtccctggaaataaagacggagcctgccacgtcccccagtcccatcctgctacagggctgtgcagagctgagatgcccccaacctcctgtcatggggactgtgatcacggtcttctcccaagagacaaggggaggagaaaaatcctagacgctaaaatctgtatgaattagctgctttatgcttttctcaaattactgtttctttccaagagaggatcccaagaaaattagctaagagtctaaggcattcccgatcctatgtcattttctctcttttttgttgctgttgctgatttttgtattgtttttatttttcatatataactatactgcttatcacctgccaggtattgttgaaagtattttacgtacattaaataatttactccctatgacaacccgaggaggtaggtgttgttattatctaccttttacaaataaagaatctgtcttgatttctccttcattgctgaagggtattttttgctggatgtaggattctagattggcttcccctcaaccacctttcacaaatgacactttaaaggtgtcattttattgtcttcttctttttttttttttttttttgagatggagtctcactctgttgcccaggctggactgcagtggcgtgatctcggctcactgcaacctctgcctcccgggttcaagcgattctcctgcctcagcctcccaagtagctgggattacaggcgcccaccaccatgcccagctaatttttctattttaatagagacggggtttcaccatgttggccaggctggtctcaaactcctgacttcaagtgatccacccgccttggcctcccaaagtgctgggattacaggtgtgagccaccgcacctggttgccttcatttgtcttaaaaatgtctatgcaggttacaagcagagcagggacaggttgccaggtcagacgcacacttacatggctgttgagtaaaccgcttttgtgtgatgtgattccttcgcttttttggaggttttcaatcgccatttcaagctaaagaaaatgtgtgcagaaacaaaacaaaacaaaatggaaaaaaaaaaaaaggaaatcagatggttagcatcagccaagatttgtttttattaatatccaaataatgattcgagctcctacaaaataaaaatgaggctccacgcaggcagggcgggggtgagttaaattgtgcatgaaagctgcggtagggagtgttgcttcgcacacgtaggtaagcccgagagcccgtccaacagaagcagcagaaatcatgttgtaaaaacttgctactgaactttaacctggcatatgtgtgtgcacgccgtagcattaatatgcagccactgcatccattccagtgtcagccaagccagcatcatagtcacctgctcctttccccacgccacatcgatggggaaccagaatgaaagcaaggagagatggcagccttgactccccagccaggctgtcctgtcgcaaatcccagggtctccccgctgctggaggctttgggaaaatagcagcgaggccaaagactcagaccctgccaccaggaggccgtaggatccagggccactggacactgtctggcgaatgtttacccagtgggagctgtgcgaagaagatttttggaaaagagaaaagagttttggaagaaagagttgggcagctaacagcagaacttcctggaggaaggggcttttgagttggatcctgaaggacctgatggaggtggggagggaggtgggcggcaggtccacgcgatggaggaggcacacagctgtgcgtggccactaaggcattcgcacgcatttggtttgtcctagactcgcacacggaaaacagcgacgtaaaatctgctgcagcccaccctgacgaccagaggactgaagcgggaggagatgaacttgaagtatatgcttcctttcttaaggaggccaaagacttgacacttctgcaaagagcaggttgagtgtgtatttcagagagcaggcgagcggagctgagttcaagaatgagagggtaactgcttctcccacggcctccgaccacggtggttctgccttctctcattagctacccttgcttcaagccaaggaggacgtcagggtcacctttaagaagtgcagaaggtacactggaggaccaggggaaagtaggatggtgagacctctcccacccatcagcctcagggtgcaggcgatgagaaggcaatcgccacctctatgatagaaaaaacacacatgccacccccatgtcttggggccattctgatctgcagcttgggcagccacgtgagtactgccctgtggcaccttccctgtgggacatcgctcacctatgggtgccgggagagcagagtgcatgacctctggaagtctgccctaatctcagggggccttgtccagtgcccagcagactgggaaggagaagaaaacactgtctctccaacatagtgggtctcaatcatttggtctattaaaaaatacactattacaaaattttgagatttcaccacccacccctgaaaaagagctttatttacttatctttttcttgagccagagtcttactctgtttcccaggctggagtgcagtgatgtgatctcggctcagggccacctctgcctcctaggctcaagtgattctcatgcctcagcctcctgagtagctgggattataggcatgtgccaccacacccagctaatttttgtattttttagcagagacgggatttctctacgttggccaagctggtcttgaactcctggcctcaagtgatccgcccacctcggcctcccaaagttctgggattacaggcataagctaccacaccctgcctgcttttgtttttaaaagttaaatgtattatttcccttattagaaatcaaaatagataatttttaaaaagatgtattaattcattaaaaaataataaacccattataggttaacacttgaagaataggtacactttccaaattaaaaaaaaaaacaacaaaaccaaaagaagagtggaatgattccgcatcttcacaaatctgtagagtgcgtgacttacagaagacaactctacacatctacttctgtatctccatctgttattgtatactgttttagttgaagtacattgaaaaaacttggcctcacacagatatatagttggaaaaggagcactgttttaatagccttttcagataactggggatatttttacttgatactatagcaacacttgacagctggtaatttcttaaaggttagctgcaatgtggaatctgaaaccatatcaacgagcttttcatcctcagttacattaaaatccattaatcttgagctgacatccatgacaatggcagagtaaggaactctagaacccatcccttcacaaaagcagtcaaaaaatgggcaaaaattgtcagaatcgactttatcagaactctggaaatgaattaaaagattatggcaaacaggtgaacccttaattaaaaaaaaaaaagatgaaacttggcatttaaggaaattttcgtcagatcactagctgaccactaaggtaactgaatagagattttggccgggcacggtggctcacgcctataatcccagcacttcgggaggctgaggcatgtggattgcttgaggccaggagttcaagaccagcctggctaacatggtgaaaccctgtctctactaaaaataccaaaaaaaattaggtgggtgtggtggcacatgcctgtaatcccagcttctggggaggctgaggcagaaggatcgcttgaatccgggaagcagagattgcagtgagccaagatcacaccattgcactccagcctggccaacagagtgagactgtctcaaaaaaaaaaaaaaatgcagattttacaaaattagttcagaaaggtcatgaaacaaacgatcaacaacacctataagcagcaacagcaaaccctggggagaacagaagaatccaatattcagcgtcaccatgttaaactattcaaaatatccagttttccacaaaaattatgaggcacgcaaaaaaaaaaaaagaaagtatggcccatatgtagaaataaataaataggactatctctgagaaaatcgagccactggacttatgaaacaaagagtttaaatcaactatataaaatatacttaaagagctaaaggaaatcatgtacaaagcactataaaaaaccatgacaggctgggtgtggtggctcacacctgtaatcccagcactttgggagggtgagttgggtggatcacttaaagtcaggagttcagggaccagcctggccaacatggtgaaaccctgtctctactaaaaatacaaaaattagctaggcgtggtggtgggcgtctgtaattccagctacttgaaaggctgaggcctgagaactgttgagcctgggaggcggggtttgtagtgaactgagatcacgccactgcactccaacctgggtgacagagtgagattccatatcaaaacaaaaacaaaacaaaacaacaaaaaaacacatgagagtgatgtttcaccagtagaatatcaataaggagacagaaattgtaaaaaggaaccaaataaaatttctggagttgaaagtataatagctggaatgaaaacttcactaggggaggttcaacagcagatttgagcaggcagaagaaagaatcagggaacttgaagatgggtcaattgagattacccagtctgaggagcggaaagaaaaaagaatgaagaaaaatgagctgagcctaagaaacttgtgggacaccaccaagcttaccaacaaacacacaataggagtcccagaaagagaggagagggagaaagtggtaaagtctatttgaataagtaatggctgaaaacttcccaaatttgatgaaaggcatgaatctatacactctaaactaaatctatacactcaacaaactttaagtggcataaactcaaagaaatccacaccaaagacacattataatcaaactgttgaaaggcaaagacaaagagagaatcctagaagcagtaggagagaagtggcgtcacaaacaaagaatccagaatatgagtaatggctgatttctcaacagaaaccatggaggccagagggcagtgaaacgacttaatcaaagtgccagaaagcggaaaaacccacatgtcaatgagcagatgaatggataaacaaaatgtggtccatccatacaatggaataatttagccacacacaaaaaaataaggttctgacacaggctacaacatggatgagcctcatgcaaaagactatatattatataattccttttacataaaatatgtagaattggcaaatccctagagacagaaagcagattagtggctgtcaggagatggaagaagggacaatggagagtggctgctagtggggatggggtttcctttcagggtgatgacgatattctggaactagataatggtgattgtaccacactgtgaatgtattaaatgccactgaactgtccactgcaaaatggtgaattttatgttacatacattctatctcaataaaaaatatacatataactaatttcaaaaagtaattttagtctcccttgcaacttgaatgagtattttactaatgggtatggttttgtaacatcatatactggtcacttgaaaaacatgagtttactgagtttgcagatcttccagacattgccacatttcattacatagtgtcaagaaatcacattcattaatatcaccaccaacctcatcagaaaagtcactaactttgagaagttgtcaggttcctggttggcagacacaactccaaaattttcatttctttgtttaaaaacttgaattttatcattggccacaaaaacctgccagctgtttttcttaatatgtcaggctttgttcatttttggaaacatgtctgccaaatacctgagtccgaataatcatagtttgtcattctttcaagcagaaatggagttttaggaaaaccatggctagttctgcccacacgtcaatcaagcacacacaggcttttcttggaggtggtcattgtactctggtggacttcccatctcatcacacacaatagtaaagagatgtgtgctcaagagttgaaatttaataaaattaataatttttactgcttcatcaaggacattcttaaatgaaactagtatttcctttctttcttctccttcccttttttttttttttttttttttttgagatcgagtctcactctgttgcccaggctggagtgcagtgttgcgatcttggctcactgcaaccttcaccacccaggttcaagcaattctcctgcctcagcctcccgagcagctgggattacaggtgcccgccaccatgctcagctcatttttgtatttttagtcgaggtggggtttcaccatgttggccaggctggtcttgaactcctgacctcaagtgatccacccgccttggcctcccaaagcgctggggttgcaggtgtgagccactgcacccagcctctttctctcctctcttaaaaacatcttttagaatgtgagcatgtggtgatgaaaaatacagtgacttctaggacagtttgatgcctctgcattcttttttaaaaaagaggtggggtctctctctgctgcccaggctggagtgcagtggcatgatcatagctcattctggagctagaagtggccatggtgtagggagggagaggaggtcattccccaaaaacccaaatatggagacacgagacagagagggccactcccaaacctgctgtagttaattcaccctctgttctaaaacagaacttagacatgttaccatagaaggagccaattcaagttaaaatgctaacaaccctttggggtctttatagagaatgcagattgtttttattttattattattattattttttgagatggagtcttgctttgtcgccatactgcagtgcagtggcgcgatctcggctcactgcaacctctgcctcccaggttcaagcgattcccctgcctcagcctcctgggtagctgagactacaggtgcgtgccaccccgtccagctaatttttttgttgttgttgtattttagtagagacagggtttcacca[133 bp omitted]atgactggaattttgaaggcagagtggtaaatcatagaattaggcctggagaagggaaaagcccaacgctgtggtccaggcagaggaggccagcagggctgagaggctgggggagggagatggggcattttaatccctttgtctgttcctcccaactcccacttggcagggggagcccccaccaatatctctgtgcacgtcctttgtggggcatgagatcacattcacacttgctttaattattttccctcagtctctatttagttctgcaacttgtgtttgttacttaatattttgtggctatctttctgaaccaattctgttgtttgtttctttgttttgagacagggtctccttctgtcacccaggctggagtgcagtggcacgatcacagctcactacagccttgacctcctgggctcaggccatcctcccacctcagtctcccaagtagctgaacatacaggcatgtgccaccacaaccagggaatttttgtattttttgtagagatggggtttcgcaatgttgcccaggcttgtcttgaactcctgggctgaagcagtcccacttgcttccacctcccaaagtgctgggatgaccagtgtgagccaccgcgcccagcaggaccgattcttagagccactgggatgacaggcatcagccaccacactcagcaggaccgattcttacagagccactgcgcactcttaacttcaacactcttaactaatccacggacgttatagaatatgatccattttctcactaatgtccttcctctggaccaggacccaatctgggatcacatactgtgatcattttgcatacggtgccatgaaagaaaacaggaaaataagaaatgggtcaacactcaagagatccatcagtagctaatcgattattagatcaatgatcaatttgtccctggttgtcttaacagcttgtcaagtgaggttatgtcacttcagacaaagaaggatgacttgtctggtaaatcaattgaaatgcttcagaataagtgaaaaatagtgctttttgtatgacagtctttaatcttgtcactacaggcaaatctgagactaaatcttcaaacatatctttcaaagggttacttgtaagtgtgaacctgggtacttttcccacctttgcaaaaaaaaaaaaaaaaaaaaaccctataaaaccagctttgaaagtgaagataggatcacacacttgccagaacccatggaacgcataccaccaagagtgaaccctaatgtgaacgggactgtagtcaacaataatgtatcaatattggatcatcagctgcaacaaatgtaacaaacaaacaacttcaaactgcaccacaaagggaactctatgaagttttaaaaaaaagtggtgataaatatcatagtgagagaaaaagcagatgtgccattggtgacattcctttatcaaacagtatcttgagtgtgggaatgtcaaaggcaggcagtgggaagagcgattatcatcatgtgtgttggctggcaaataattcgctctgatcattggacaaaagctctgctatgcaggggctgagcaggcttctggcagatggtaggagtacccaagtgatttatttttatttatttatttagagacagagtcttgctctgtcacccaggctggagtgcagtggcaccatcacggctcactgcagcctcaacctcccccagctcaggtgatcctcccacctcagcctccttagtagctgggactacagacacacactgctaattttttttttttttttttttgagacggagtctcattctgttaccaggctggagtgcagtggcacaatcttggctcactgcaacctccgcctcccgggttcaagtgattctgctgcctcagcctcccgatgagctgggactacaggtgcgcaccaccacacctagctaatttttgcatttttagtagagacggggtttcaccatgttggccaggattgtctccatctcttgaccttgtgatccacccgcctcagcctcccaaagtgctgggattacaggcatgagccaccataccagcccaatttttaagttttttgtagagatggggtctcactatgttgcctaagctggtcttgaactcccgggctcaggtgatcctcccaccttagcttcccaaagtgctagtattacaggcatgagccactgtgcccaggtgacttttcattctacatcttcactgaagagccaggctacagaagaagagatgtgtgtgactcctgattctgtcatgagctgtgccactgcgtggaggtgccatgggcctctgcgagccacctccatggaccaccaggaaggggtgctctctgaaccttttctagttctgagggctgcctgactggagagttgttctttgctcagatagactcttgtttaatttaccgaaaatttctcttttaatggtattatgtatcgggtatcataagacacccttcttgggcaaaaagaaagctgtcaaaggcagaatatttagcttgttaaactaataaagtacagtaggacattttaacttcagctgcaattaaaatccattagacttttttgatcttctgctgtattagtcagatttaaactaataaaatgagaaaagatgcattaaagtatgagaaaaattttaaaaaagataaaaaagataaagactttttgtcttcgtcagggcccaccgtgtgaccctcagaggctgtgtgttttcacagcatggcctcatgtggcctctgggtcttgcaggaggaagggcccactgagggctgctcccagggtggaggggtctctttcttgttcccccttgagtgaccttcagcctcccctggacacaacccaaacagtaaaaaaggaggttccacttgggcagaaaggacaagaataaaactcccactttagtttccctgctccacgcagtgaaaaaaagcacaatagaaaacgtgtgtatcaaaaactcaccatttgggcaactaatttttaagatttataatatggatgacattttaaccagaaataaatactcgagaaaattggtcaccaagagtctggaatcactcgtcgaggctaccagtgaggacttgcttcagtgtttgtgctctgtctttaggactaagcgaaagtcccgagaaacaaaactctgacatgaacgaactggtagacatccaatgttgggtccagcagctgtatttctgttgcaatttcagggccatggttgttcttggctcttggaaagtctcgaatttctgtggcatccttgttggatgttcttatgccaacaacaagccaataaacaacagcagagcagtcagaagccaggaatcagattcgtatccaagatgatgactcccccagagcttggtggggggtgtgtgtgtgtgtgtgtgtgtgtgtgtgtgtgtgtgtgaaaacatagcctattcacggatttctaattgatttaataatttagttcttccagagcaacccacataacaaaccacagctccagggtggtggcccagggtctgagcagtatgtttgctgcaatgaggtaattctgaatccacagagaacatgattgtttctcagtaaatttgtgacttgcaatcctagtctattttactgttataagttgatgccgtttgctaagtcaaatgtgccacattcgtgacaattactgtagtctgcgaggaaagctttctgttccataacaactaaacctagttccacccagccaatcccaggcgggagaagtatgtctggtctgctggggctgcctggcctggggtgctaatggcaccgaggcactaagtggctaggggtagaagcagcagacactaccctacaatttcacagcctctagaaagcaagtgactcctcccgagaagagagggaggaggcatggggcactacgcctgtcctcaaagccagggcctgggggtcactctggacaaaggaagagagaggacagcaagattcatggggcctctctgatgccagggtgaccccagaacacaccagaaccaaaaacaaacaaacaaaaacacagagacaaggctaaaccaccaccttctatctcaggagatgagccttacaccaaaataagaagttattgtgtaattgaaagtcaatcaatgcaattcattatattaacaccccaatgaagacaaaaatatgctgatgcttacatatgtaaaaaaacgtttgacagaattcaacatctatttatcatagagacttccagaaaactagaaaaagaagggaacttcctcaacctgaaaaagggcatctgtgaaaaacccacagctaacatcacatacttagcagtgacagactgacggcttttcccttaagactgggaaaaaggcaaggatgtccattcttgccacccctgttcaacatttcactgcaagtgctagccagtgcaaaaaggcaagaaaaagaaatgaaatttctttttgtccatattggaaagaaagaaataaagcagttatatttgcaggcaacaa[132 bp omitted]aactccgtctctactaaaaatacaaaaaattagccgggagtggtggcagacacctgtagtcccagctactcgggaggctgagg[131 bp omitted]attacaggatacaagataaagagccaaaaatcaaccattttttaaatcctagaaatgaacagttggaaacagaaatttaaagatcaatgccaagaaaacccacaatgccatttacaatagctctccaaacatgaaatactttgatataaatctaacaaaacatgtacagaattttgtataagttacaaaatgctgatgaaagaagatctaaacaaatggagaaaacgtaccatgttcatggattggaagccttaacatagtaaagatgggaattctccccaagttggttcagtgcaaattagtcaaaatctcagtagcatttctttgtagatatagataaattgatctaaacttatacagaaactttgagtttatataaatagtcaacgcaatactgaagaataaagtgggaggaaccatcctcttcaattttagacttactataaagctatagtaattaagactatgctacttgtaaagggataggcagacagaccaatgggatggaataggacactctgaaataaacccacacacatatggccaactgatttttgacaaaggtgttaaagcaatccaatggagaaagggtagtctttttaacaaatgaggctagaacaacacattgtttcataagcaaaaaaaaatgaacctcaacttaaaccttacattatacaaatgtt[144 bp omitted]taaaaccctgtctgtactgaaaacacaaaaactagccgggtgtggtggtacacacctgtaattccagctactcgggaggctgaggcaggagaatcgcttgaacccgggaggtggaggttgcagtgagccaagatggtgccactgcactccagcctgagtcacagagcaagactccgtctcagaaaaaaaaaaaaaaaaaaaaaaaacccaaaacaaaagtaaaactataaaacttttcaaagaaaacaggagaaaatcttcataatgtgcaaataggcaaagagttcttagacatgacattgaaagcatgagccacagaagaaaaattgataagttggatttcatcaaaattaaaattttttttttctctgcaaaggacactttttagagaatgaaaagacacactaaagactggggaaaatatttgcaagtcacatatctgacaggagacttgtatccagaatacataaagaattctcaaaactcaaccataagaaaacaaccaacctagttaaaaaagaagcaaatgacttgaagtgacacctgaccagagcatctacactcacatgaaaagctgctaccatcattagctataaagaaaatgcaagttgcaaccacaatgaggtaccaccacacatctattagaatggccaaaaccaagagcaccagcagcatcaaatgctgctgacggagaggagcaagaggaactcttgtatgttgctggtgggaatgcaaaatggtgcaaccacttgggaaactggtggtttctgataaagttaaacatacactttctgtatgagccagcagcaattccacttgtaggtatatatccaaaagaaagaaaacatatgtccttacaaaagcctgcatgtgaaacttagagcttctttattcataatcaccccaaactggaaaccatccaaatggccctcaactagtgaatgaataaacaaactgtagtgtaatagaatattactcagtaacaaaaaaaagcaactcggattcatgcagcaacttgactgaatctcaaaggcaccagaatgagtaaaagaagcctgtctgaaaaggtcacaatctgtacgattccatttatacaccacgctagtaaagatgaaactacagcaatagggaacagatcagcagttgccaagggctggggatgggggaggttgtgactgccaagaaataccacgagggggttttcagggcaatgcactgttctgtgacctgattatacacaaatctacccatgtcaaaactcacaaggctgtacaccaaaaagttgattttactttgtgttaatttaagaaggaaaataaatgaaaagtaaacacgggtaatcgagttttaaatgtagagactctggaaaagcagataagtcgttattttgcatcggggcatggcagcgagaactcggcagaggctgcagggaaacttcccctgcttgattcagtccaggtgtctcatggatggattgatccacgcctctaaaagcttgatagtaacaacgataacaataataagagcaaaggaggctgcagcatccaccagtggagagatgcttgactcattcccttttcacaacagcccatgacgcatggcttgtcctcctctttataccaatggccaactgaagttcaaagaactctgcaggcctgcctatggttgcgtggcccgtctgaggctggcccgactccatcgtggggccgcctgggcccagagcagacgacagcccctccgggcctccggctgcctcttactcaccatccctgctgccgctgcttcgagaatactcatggcctaccctgctggtcccaagagcctcctacataccgtggcgggcgatgagcgggaggtgtgggccagggagtgtctggtgctgtccatccccccgtggatgagataggctcccgcgctggagacgatggggctccccccgacatccatggtgatgcccaccatgctgtgggaggggaccgctggcggggacgaggctgccacggtcacctgggcaccgcctggggcctcgaagtaagaagccgtgctgctgggggcgtacatctgaggctcggggttgtaggtgtaggctgttcgtctgttagaaagagagaagtcacgcatgggacgctgtcccatttaaatgccttgtctgagttcacagatatccagccaaacatcacgtaaaagctgcaacccagagaggccagacatatggagcaattcggacgtggcatatgacactcaaatgcagcgcaagttcacagccaccatgttgcaaaatctttaggacc[137 bp omitted]catagagagaaccatctctacaaaaaataaaagatttagccaggtgtggtggtgcgtgccggtagtcccagctactcaggaggctgaggtgggaggactgcttgagcccaggactttgaggttacagtgagctgtgactgcaccattgcactttagcctgggcaacagagcaagaccctatctcttaaaaaaaataaatacaaataaaacttaaaattgtaagtggataaatgggtcacatgagggagctcctgtgtggagatggagcagttctgtatcttgatggtggtattgttacacaaatctacacatgggctaaaaatgcaaagaaatagacacgcacgcacatgcaagggtacacacatgaacatgcaaagccacatgtactccacatgcaagcacacacgcaaaagcacgtgcatacagactggtagaactgaataaggcctgtgggctagttaacagttttaccccaatgtcaatttccaggggtttttttgttttgtttttttgagacagggtctccttctgtagcccagacttgagtgcagtggcaaaatcatagctcactgcagcctcagcctcctgagctcaagtgatcctcctgcttcagcctctgaatatgggtgtgcaccgccacagtagctggggtgatgggtgtgcaccgccacagtggctggggttagaatcatacaactccaccaatcacaaccctgaagtcacagccaggttctcatgtacagcccctgcacttgtgaggggagccatccaggccaaatggaaacagacaagcaggcgaaaggactcacgtctaaagtaaagtgagctgcacgggagatgcatactttcctaccccaagcatcacacagttacagagcagaaaactctagacatccttgcaacatggaaaatcaagttctatcaacattatacaaagctggagtttaacagaggcgaggggaaaacacacaggggtggatggtttctggatctcaaagactgagacttcagaatgaagagttaggattagcctttttttttttttttccaagactatcttttctaaaagtaaaaagtacaaaagtctgtgatttctgaaatctccacagggttatgatgtcctaatccctcagctcccaccccgctccttttttttttggacagggtgttgctccatcagtcaggcgtgatcatagctcactgcagcctccaactcctgggctcatgcgatcctcccaccttggcctcctgattacctgggagggactctaggcacttgtcaccatgtctggctaattttaaaattttttgtagagatattgcccagtttcctaatagcattttaacagtatttagtgaacacatcgccaaaagcataagggagaggaatttgcttgatgcctccccaggtggcaaaggctggagtcagggagagggttccgggtgtggcccgcgggagaagcacgcacatggctccattggtgtagacggcgtctcccccttccacgtactgcacctgggcaggatacacgtgctgcaccggctgcacctgaaacatcggatacgctgcgttaccgccagtcacgccctcgtgagttgcctgcagattattcaagctagacgtgtcttctattgcctttatgaacatttagtaccaaatgacaatgttcccgcccacagtcggcacgcctagaaagacactgaggagacagtaatgtacagacgacatattccaaacgggcccacacagttcagggagctgcgactgatccccagagctctgctagcgtgtctgtgcgccctggctcctctgtatacgtgggggcgggaccaggagaatgacaacgctcctccagtgcagtggaaactagagttgtggacagaggcccagccttggctcacaggactgtccctggtttctgttttttttttttgtttgtttgtttgtttttttgcgacagggtctccctctgtagctcaagctggcgtgcaggctgcagtgcacagggggctgagcagattagactctacatggccccaacaccccccgtgggtggccctggtgccccttccctggcagagaggaggggagagaatgtgatggtctgaacagagtgggaaggagcggcatgcctggagagatggggcaatggggggaccccagcacacccccgctgccctgccctcccctctctgaaacatcagttcagagcctcggctgacaggccccgagggactctagtccgagcagtggaagccaaacgctttgcacatgggacttcaaactctcaccccagagggcatcttagtggctgtctacatccactgaattttggggtgagaagatggagggccacagaagtgggcttgttcgggtgtcatggtgtcatggtgaccttcctcttgtgcttgaagctgcaggatggggctgacctgcccctccttggaccactgagcatggtatgcacttgtccaacgcaccacccccagaatcacaagttccaggggttaacatctgttgggtgatgccccaggggtggaagtcaaatgtcgaattctggggtccaagtgaaatgcagaagttacagaaagagctggggcaggcccagcaccagaaaagtggtggaagcttctggaatctcctctccttggtgtctctggggagtgccttgacagacagcagctaagacagagccactggcctgaggccctgcgtccccgctgggcctgtctggagccttttccttcctgtgatcctgcaaaccttcctagttctcatggacacagtcacctgacaaatgcctgtgaacagactgccaatctaggcaggaccctcctgaagagcggtgcattctctagggcctcagggctccttttagggaggagcctgagttaactttaattcaggattctgcagggcacagttggcaaactccggccctgagggccaaatctggcccactgcctgtttttgtaaataaagttttattggcacacagccacacccatttggttgcatatcatttatggctgcttttgcgatacaatggcagaattgagtggttgttccagagactgcctggaccacaaacccccaaaaatgtataatttggccttttctggaaacagtttgctaaccatgcttctagagtgtccccaagctgatgatctgtgttgctacttggctggtcagccgtgctttcaaactttgttcttagataattgaaatcataagaagcatttcctctgttgtgcccgcatctgagggtatggcactcactagcagatggttcctccagtccagagccctttgtttctgtctgcatttctacctgagctccacccagcaggtgcggggtgctcactggttccccaaatgcttgctgaatttctgaatgaacgaaagatcaccagctttcttggctttctgcaaaactatctgcagtaaatgatttttttaaaattgcacagcttctggaaaagtcttttggctaagaaactgaagcttacaacaaggaacagcagccacagaaaaggatgcatccttcagagattgttctggattgctgagtgctaactgcgccccggtttgcacggtgctgcggtgcttgtcattacctgctggggtacctgctgaactctggggagggagatcggctgcatctgggcccctttgggattggagctggctgcctggaccaacaccctctaaaagggaagggagagaaggccagttagacttgtcagaggtcagtgctgaggatacacacagaatgtaagatgctgtttgtctgttcatgtgctttttattaaaacataggcaggactgatcagaggcgacggcggggtgatggtcagacttgcacactcacaccgacctgggcagacacacggcaggtacgtgcaggcacacaaacaatgcacatacatacacaagtgtgcacatacactcagcccatgcaccacacatatgcacgaattgtgggcacacacacacgtatgcacacacacatacacggaagcacatgcaccttcacccgcccaggcagctttgcctctgtgggtctgtagtctgcagcaaggtgacactgatcgtccctagtacagaggggactgctggggccctctggatagccatccgcaccactgcgtgggagagcactctgtggcgcccctcgcttctgcagtataacccggacttgtttccattttctgatgaggttaatgaagccagagggctcaagtgctgcctctggctacagaatactcgagtccaggtgccctgtgtctgggtccctcgctctctgaccccactgctctccagcctcctaagtcaaatctgcacagtgtggctttgctatttttctgggagtaccgattggccacacaaagctatcaaaatgggaagggtcaaagtgaactcgagtcgagggaggaacaggagtgttttgtgtgtttattgagagctggggctttcggagtcattggctgcagtgctgtgatttcccggcatgaaccctgaatgtcacaggtagcagtgactgccatatatacatcacgaggggtgatgggtgaggacacgccatcccctgtgttgcaggagtggagctaaggatgaagatggtgctaataaggatgccagcgcaagggcattctgattccaggtgagctgggcgccgtgtgcttggagaattcacagggtcctggcaagtcctcagagagggaccacagtgatgaaacctgggacacacatggtggccgtgagtggcactgagacctgtccatggtggctgctgcagaggaaggcagagtccacctaggcctgggagagcctgagagaggggcttggcaggaagacctgagggctgactcctcttggacaatttcaagtgggcacggaaacatatcaattaggccacaactgctggcagggcgacggcgtctgatcctcacctcagatgggcttccaagacgccctccccactgccatatgtgcaagaaataaaagctaaagatgtctgaccatacacactacatcaaataaaccgcttcactgtctgcctttttgtttttgcggaattgtgtttttttgtttttgtttttttgtgttttttgggacggatttttgctcttgtcgcccaggctgaagtgcgatggcacgatctcggctcactataacctctgcctcctgggttcaagcgattctcctgcctcagcttcccgagtagctgggattacaagcatgtgccacaatgctcggctaatttattattattattattttttgtatttagtagacacagggtttcaccatgttactcagactggtctcaaactcctgacctcaggtgatccacccaccttggcctcccaaagtgctgggattacaggcatgtgccaccatgcctggccctgaattgtgtgttttaaaaccataatcatttctttttgctgtgctcctaacttttagattccagatcgaggtggtcacacggccacagtggacctctgcacactgtgatgagcctccagcctgtttcatgtggccggtgccattcgctttgtatttctgtcttctttatggcttatttcattccacggtagaaatccaggagcagagaaagcctgaatgtgaaaattctctctctgcgaattttaaagaatatgttcattcaggtgctaga[137 bp omitted]catggtgaaacctcgtctctactaaaaatacaaaaattagccgggcgtggtagtacacgcctgtaatccc[137 bp omitted]gccttttttttttttttttttttttttttgtcacttaggttggagagcagtggtatgattacagctcactgcagcctcaaaccactgggctcaagcaatccttccaccatagcctcctgagtagctgggaccacaggacgtgcaccactatgcctggctaaattttttattttttatttcttaaagacaaggtctctgtcacccaggctggagtgtagtgtcacaatcatggcttactgcagcctcaacctcccaggctcaggtgatcctcccatctcagcctcctaaggaactgggactacaggtgcagcccaccacgcttggctaattttttttttttttttttagagaaagggtctggctatgttgcctaggttggtctcaaactcctggcctcaagtaatctgccagtctcagtctcccaaagtgctgggattacctgtgtgagccactgcacccggccttacttcttaattcttaataaagcatttctgtgtaaaagggtcatttccaagtacaagaaaacctccactgaaagctaagaagagatcaagtcagatttgggagagtggtttcttttccattcatgtcattgtttccttgatgggatctttttaacaaatattgaaaaagccaaatacagttaaggaaattgtgcctatttcaacagcagcagcactgggactgagaagtccattcagaaaaatacagattcctctctttgcagatctgagcagctttcaaacccatagagatcgcgtccacactgtggccaccctgttgttgctgagaggcgcgcgttacctgcggggaggctggcacaggcggggctgccgccgagggacgcagagccacggacgctggcgaatccgctccaccctcggaattctgcatgctcaggtctaaagaaaggcggagagagattgggtgggcaagggctgcaagcactgaaatccgaagaggcaactaacaagttcaagggagggaaggagtaaccagctacattcttcaaagtcgaaaggcagagaccctggtggtactgcctaagtgaggagctgcggaaacaggctgcacaactgtcccacagaaggagagaggggccagagaaagttttccaaatataaaacccaaaaagggctctgtcagcgcacaatggcaggaattcctcaacagaaggccgggacactggctctgtgcccaagtctgagcaggttgaactattttgaagggctcaattgtttcctcatttacccagaaatcaaaagctctgggtgggtgactgccatttgggaagctactgcaccccaaacgacaacgggagaaactctaaggctgggtttccccactgtggcaccgttgacatttgagctggatacttctttgctgttggaggcccattctgggcacggcagggtgctgagcagcacccctggcctccacccattccatgccaggagcgccccctccccaagctgtggcaatcacaaatgtgttcagatattgccaagtgacccctggagggcagtgtgagaaccactggctagggagagaaaaggtgacctgcagagggagcaaagaaacagtacattttatcctgggctggataaaagtcctcacgaattttggcagtaagtaaaaactgccttctgttcaaagccatctttgcccacaagaaagtataaacatatatttctttgctgtcagaggcatacatctttcaaataggtagttttacaattctatataaaaccactcatttaatatcgtggcagatgatacaaatttgttccatgaaaatgctaaaagtcgaacagtcttcacttttaaataaacaatcggctatgttgagcatttgagacatagttaagtacacacacttaggtagggaggtggctttgtgatcaggcacaccagtcccccgtcctggcaccagctttgagcatgtcaccctcccagtgtggggtctccatggctcctgcctgctgggggtggtgaggactgaacctcagacatacatcgcggtgcccacgacatcgtcagaacacaatagacatttgctagaacttttacgtttctctatcacccccagaggttttatctcttataatgagtgaaaaaaattttaagctttttaaaaatgaaaagtcaaacttacaataaattaatttacctaaggaaagcagaaagggatatgtgtgtttgaattcgagtgtgctggattaatcccatctgtattgttggggactattccccgaccaccaccgctccccggcccccgcccccgtcccctcccaaacgccttcgatgccacccagagccccacggccagtgcctggggatttttctgttctgtgtgagcctgactcacttctcaccactagatggccccagagccacacggtgattggctggggcgttaactaaaccttacacagcccgcacctcctaccttctactctttcaaaagattgtaaatttcccatagtgtatttcctgagtcctcaactcactctctgtctttgacagaactgacctttggaatttttctgttacaagctgcttgtatttacagtttcctttaaatgtttaaatcagtcatttgcacaccatccaccatgctgttcccgtctgaagccaagcgggtagcatcagtgatactaggagataatttgactagaactctttgtgaaaggagtccaccagtgataaagtcagaatgctgacttgactaagaccagttccttgttccgcaggtggaaataattttgctccaaactccagaccttatttaagtaagaagaggccatgagagtgttggggataaatggcgagaccgtggtctgtccaccatggccagaatgcaccttccagaaagcaagttgttccacatcacaggcatttacacatgaatgtgttcccctaatttatttttattaattattattattgttttttgagacgaagtcttgctctgtcacccaggctggagtgcaatggcatgatcttggctctgcctcctgggttcaagtgattctcccacctcagtcccctgaatagacgagattacaggcacccaccatcatgcctggctaatttttgtatttttatagaaacggggcttcaccatgttggtcaggctggtctcaaactcctggcctcatgtgatctgcctgcctcagcctcccaaagtgctgggattacaggcataagccaccgtgcccagcctgttcccctaatttaacacactatttaccatgtgttgtcttataggtcagaccaatgagtctgtggctttttgcctgtgggcatgccccagtccacaaatgcttgggtgccagaaagcatcagcctcgttatcctgaagggtcagaggacagagttctgaatgctggggtgtggagattctggaagagagagagccacagaaggggtgagccctcaaatcttcctacaaaatacacctgaatctttggctaagcaactacaccacaaaggtgtgggggagataccaggggtcttggggaaaaaccagcagtgcaaagataaaaaaattaagtgaagatttcagctgctgcctgttgcaggagggagagtttgaatctagccaagtcacttgccttcaggggaactcagatgaacctacagattctacaatacatcattaatgatgtccaggacccagtaaaaaccatgagctatgaaaagaaacaggaaagtgtaacatacactcaaaagaaagagtaacaaataaaaagaaaaaagaaaagcagttaattataaccaaacgcaagataacccagatgatacagatagcattcaaggactaaagcagctactaaaaataacttcaagaacttaaaggaagttatatacataatgaatgaacatatgggaatctcaatcaagaaacaaagtataaaaggagaaccaaatagaaattctagagcaataactgaaacaaaaacttaactggatgcactcaacagctggttaaagataatggaaagagttagtgaacttaacaatagataaaaagcatttacccaatctgaagaatgaagagaaaatatatgaagaaacatgaatagaacaaactgtctaatatatatgtaacgagagtcccagaagagaaaaagagaatgtaagagaaaaaaatattgaaaaatggccaaacacctctacattgggtgatggatatcaacttagaggtccaaaaatctcaacaaaccctaaaaagaatacaaagaaagccaagataggtatgtcatggttaaactgttaaaagaagcagtcagagaaaaactacatattatattcggagaacaagggcacagatgatgactggcttctcatcaataacaatggcaaccagaagacaatggagtgacatttttaatatgctgggggggaaaaccctatcagcccagaattctatctccagcaaaactattcttaaaaactgaaggtggaataaagacattttttgcataaacaaaacctgataaaattttctgcctaccatgagaaatgctaatggaagttcttcagaatgaaaggaattaataccagatggtaaatttggatctattaggagtaaatatcacttaaaatgataaatacgcaggtaattataaaaaaccgtatttttatatattttatatttttccttttcttctcttaatttattttaaatacataaaactatttaacaaaaactttataacactccattgtggggtttatatcatatgtagatgttctccatgacagttgtaacacagaggatggggacaaattaagttatacattcaaggttcttttattttacctaaagtagtaacatgttaactctataaattgtgataaattaacaatgcacattgtaacctctgaagcatccactaaccaaaaaaatatatatacaaaaaggtatagctaaaaagctaatagagaaatcaaatgaaatcctacttaacatatttgattatctaaataaaggcaagaaataaagaacagagaaacaaacaaacaaacagatggcacaaatagaaagcaaatggcagaattgctttgctaaatctagacatattaataatatattaagtgtaaatagactaaattcttgaatgaaaaggcagaaatgatcagcctggataacaatcaagatcccattatatggtccctaaaagaaaccctccttaaaaataaaggcacacataggttgaaagtaatagaataaaaagagatccactgtgcaaactctgatcttttatttttatttatttatttttttgagatggagtctcgctctgttgcccaggctggagtgcagtgccacagtctcagctcactgcaagctccacctcccaggttcacgccattctcctgcctcag[208 bp omitted]ggctgtaataatcagacaaaatagactctgagatgagaaatattactagcaatactagagacattgacaagacaaggaatattactgcagataaaatttcatcataagatgatcaatttatcagtatgacatattgattacagatatgtatgtacctagtaatacagcttcaagatacgtaaagtaaaaattaacaaaactaaaggaggaaataaacaatcataatcggagattttaaacatccttcattcagtaattttgattactgaatcaaaattagaagaactaagcagaaatattactaaggatacagaatatctgaattatattatcaaccacattgatgtaattgacatttagagaacactacaatcaaaacctgcacattcttttcaaatgcacatggaatattcactgtgatgggtcatgttctgggccataaaataagcctcaatacatttcaaaataccataattatacagagcatgtatgcactttgaccacagtggagtaaattagaaatcagtaagaaggttagaaaaatgccaaatatttagaaaacttaaaatacaccttcaaaataatccatgggtcaaataataaaccccaaagaaaaatagaaaatattttgaactgaattataatgtaaacactttgtatcaaaatttgtgggcactggtacaaatattgtgggtgaaaaaaagaagtaaaattattaagaaaaaaaagtgggcacacctaaagcagtgcttagaaagagatgtttagctttatatgcttatgttagaaagatttaagaacgttttcaaccttaaaaagctatatagaaagacaaacaaactaaacttaatagaaagaaggaaaaacaataaagaacaaaattaatgaaattagaaactccacaaacaatggagaaaatgaacaaaagcaatatttcttcaaaactgaaattttttcagaagaagaaaggagctatcaagccatgaaaagacatggaagaaatttaaacacatactatgaagtgaaagaagccagtctgaaaaggctacatactgtatgattctaattaaacaacattttggaaaaggcaaaactatgaagacaatgaaaagatcagtggttgccaggtatcagagagagggatgagtaggcaaagcacagaggatttttaggacactggaactgttctgtatggcactataatggtggacacatgtcattatacatttgtccaaaccatagaatgtacaacaccaacagtgaactctcgaggaaactatggactttgggtgaaaatgctgtgttaatgcagatttcatcaactgtaacaaatgtacaactctggtgggtgatggtgataatgagggaagctgtgcatgtgtggaggtatggggtatatgggaaatctctgtattttcctgtcaattttgctgtgaac[132 bp omitted]gtgaaactctgtctctactaaaaacacaaaaatgagccatgtgtaatggcgggcacctgtaattccagctactcaggaggctgaggtgggagaattgcttgaaccaaggaggcagaggttgcagtgagctgagattgcactactgcactccagcctgggtgacagagcaagactctatctcaaaaaaaaaaaaaaaaaaaaagcaagtatttaaaaaaagttaattaacaacttctcctggaaagactgataagaaaagaaaacccaaattgccaatatcaggaatgaaatgaaatatatcactagagattctacagaaatcaaaatgataatagagaactattacaaacaactttagcccataaattcaataacatataaaatgaacacttttttaaaaacacaacataacaaaactgacacagatgaaataaaaaaatgtgaatgtaatacatataacaaaaaaattgaatatgttattggaaacttccctacacagaaaacttcaggcacatatagttttactggtgaatgctatcaaatactgaaaaaggaattattacacaaatgccatcagaaaataaaaaaagaatacttcacaactcattttatgaggtcagtaaaccctgacaccaaaacttaacaaatatattacaaggaaagtgtttagactaatatctcttatgcacatatatgcaaaaataatttaaaatattaataaatcaaattcaacaatatataaataatataacccacacttagattatcaattgatttttttttctaatggagcctcagctcttttcttcctcaactggattttcacaaaggtgtcaaggcaattcaacagagaaagaagtcttttaaacaaatggtgatggatcaacagaatatccatattggggaaaataaatgaaccttgacccctacctcacaccatacataaaaatgatttcaagttagaacatgaacttacttacacacaaaagctaaaactataagacttctcagagagaacataggaggttagacaaaggtttcttagaatgcacaaatcagcataaaagaaaaacttgagaaattagatttcaccaaaatttaaaacctctgctcattaaaagattttgctaagaatatgaataggtaagccacagcctgggagaaatatttgcaaaacatgtatctcataaagggctttgatcctaatatatctacatctatatctatatatataaactcctacaattcaatataagatgacaaataacttaaaaaaatggtacttcacaaagcaagatatacagatgcccaaaagtacatgaatagtggtcagcctcattagtcactagggaaatgcaaattcaaactatatcaagatatcactaaatactcactagaatggctaaacctgacaagtctgacaacatccaatgttgtaagtacatggagcaactaaaactctcacacacccccatgtgtagatatgaatgatatgaccacactggaaagaggtttggcagttttctagaaagttaaacctgccctttaacccagaattcctcttgtagtttttatccaagagacatgaagacatatctcttcaaaaaaataataacaacttgtataagcatgttcatagcagctttttgtttgttggtttttgttttttgtttttgagacagggtctccctcaggataaagtacagtggcacaatcacagctcactgcatcctcaacctcccaggctcaagcgattctcccacttcagcctcctaagtagctgggactacaggcacgcagcaccatacccggctaatttttgtattttgggtagagacagggtttcaccatgttgcccaggctggtctcaaactcctgggctcaaatgatctgcccacctcagccttattcatagcagtttgattcagtcaccaaaaagtaaaaataacccaaatgttcctcatcaggagagtggacgagaaattgcagattatgatgatttaaagattcatattgaaaaccctaaaacaaccactaaaaatggaaaagaagagcatagctaaaaagctaatagaggaatactactggaatactcttcatgaatagaaaggaattaattactgaaattcacaatgcatggatgaatctcaaaatcattacgctgagtgaaagaagttgagtccaaaagagtagatgagtagagtggattaaaactaaagttaaaaaaaaatcataatagtgggtgggggggcaggtggcggtgggcgagagtgactggaaagggacaggaggggacactccagtgagatggacgcattctgtatgataatacagtgtgcggttacatggagtcgtgatttgtcaaaattagccagctaaggtttgtgcacttactgtatgtgaattttaacaatgacaacgaagcctgtaaaaatacaagggtggagaggaggacggagagtgggtacaggtatccaggtgttataagaatggcaggaccctgacaccctgtagagggtggtggcttcataagtttcattgcattgtgtatttactttgtggatgtttgaaatttccatgataaggagttaaacaaacacacacacaagacaccagcgatgagcaggagtggctcatgatcctggcggtgcttccaggtaagcgcagtagctcacatggtcctcccagaaggggtgatgctggatcctgagtaactcctccacctggcagaggagagcgcagcagagagtgggcagagggcagggccccgagggcgtgggtgtactcaaggtaaagtccacagggcacagggacgcacactgtggagcacctttgcagcacccagtttgggaacccctcaatccagtgcaagacagtagatgtgagtgagtggaggccatgcttcttctctgaacctgaatctgctgtgggaacttggacccattcagtgactgccctgccgtccttgctttctcgcgttcctttgtcctctcttctgtttttcttcctgtggcgaggacctgggcagtcttactttgactgccttcccctgtgtcctcttagactgggttacaggagcctcggaacagccaatataaaggggaggggccgcaacacgacctgtcacccagcctggccctgcctggccaacgggcttggctggcccaaagctccctccctcgtgcctcagaaatatgcccggagtgctgtttataagctgagcacgtttcatttaccatctggtccaagatcagggcgggcatgaaataaaggggaaaagcacagaaccagcggcgcaatttcccctccttggccggcaccagcctttggaatccacgaaacgctcatttgaccttgaacgaacattcaagtgaaccagatgcgcacttgaccttttggagccactgctgagtcaaacgcgccagtgggaacatctcccgtggcttcctgacttcatgtgagggggcacaggagagacgcagctagaagcagccctggactacggccgtgatgaatgaatctgcctgggcacaaagggaagaggcttctgtttacagaaaaatactcccatcacctagtaaccagcaatgtcaggaaaggaaatgcagaaaacgctgagagcaatttctgggcccgttcctggctgagccgctgactcactgcgaccttaagcaatctctcttctattcctgttcctccatatgccaaatggagctgtcacctgcctcacatagttcagatcagtatttagacaatgttttgtcatctttggtgataattggggcagagttagctgagtggttttagttaccttcattctgattggctgatgagcctcggtgtttgggaggcacgtggcctcctccggccatcagctcctcctctcctggtactcgctggcctccagatggtaccagagttcatctgccctaagaaagcaattaatttcctccctctgaacaagaaggaacaagcccggagtgctctcaggagtaccagttgcttcaaagcccagattctgtcctggtagcttgtcttaacactcccagtgtcattaggctgcccagaaaagtcttgtccgtttccttctcccggctcccctctgagggccaggtcctcggagtaagtgatgcgtgttttaagattctgtcctcactgttcaggcttgtgtggcctggccccacgcacagggaggacacctccaagccatctccttgccgaaaagtggattctcgaaccctccttgatggtggaaccatgtcctttctggcaccaggattactccctgtggacccagttggttctcagtgccaagagttattactctgccctgataatcaccaaagatgacagtgtgtgtccccacttggcactgtggacattggggacggatccatctctgggctggggccgtcctgagcactgcagggtgctgagcagcatccctggcctccgctcactccatgccaagagcacccccagttgtgacaaccacagatgttcccagacattgcccagtgtcccctggggcgcagaaggacctctgttcaaaatggatttgtgatgtctaagaaggggtctggacaaacagcccccgagtaaaacaggcctgtagacagggtgagaacaggaagatgaaaaaggagagtaggcaggatgcaaaatcatgacaattcagccaggcaaggagtgtgaaataaatgaacaggaccctctgaaggctacccacacattccagagcagcaggcttcaatgcacaccaagggcaaccatcgttccctccgtgcctaagccacgggggtgcccgtcattcctcacttttgggttttttttttttctcctcttgtagcaatgggctttcaaggactggagctggctccgagcttctctgaaatcaagtatcttcagaattcaaattcctttttcttttcgtaagaattgggcttctgttcctgttttcttctcaggagccaaactttccctcctttctctagaaaaggatcagaaccaagcccttgacaactggcctgagaaagggctgtttgcagactggaagggggatgggggagtgcagacacccagtaggcccttaagtcgcaggttctaatcttcagaggctgagagcaggctgcgctgacaaggcctcccctaagccagggacccccgtcttaacagtggaaacacccgttccttcccctttagaaacctgacttttttttttttcagacagagtcttgctctgtcacccagactagagtgcagtgatgcgatcatagttcactacagcctcgacctccctggctcaagtgaccctcccgccttagccaaccgagtagctggaactataggtgagcaccagcacgcccggctaatttttaattttttgtagagacaggggtcttg[131 bp omitted]caaactaaagtatggttacctcatctctgatgtggtctgattttaactgccatcaataatataccaaattcagggtgaattttgaattaaaaaaccaccaagtcttcatgacactttcacccagcaaatactcttttggcaggcaacctgattccactgcttctagcaataacttcaacaccacaaaacttggtttctaggaaatggaaattctccttaggttatggggtgccctaaagtccaacacattggagtgaaaggtaactggataccaagctagaggccgagcagcagctggtgctctgtcccccaggagtggatatctgtcccccaggagtggacatgagagtgtcacacacacacagacgcatgtatacactccccacgtatgcatatacacaaatatacatggacatacacatatacacaaacacacacacacaaacacatgtacatacatgtatacacaaaagtacacatgcagacacacatacatgcacacacatacaccacctgacgcaggataatatgagaagaatggccaaaaccactcagaagacacgtcattttcttactccatacatttttctattaaattgaatgttgactcctcccactagacaaaaacaacgattcttgtagtaaaaagtgatgggggggagcctgtgttcacacatccacacacatgcctttgggagaaagcctcaaagtacatttttttctctgtacttttctccttgcaagattccattctaaaattgcaactcttttgtcccccttttctgacaccgcctctgcacctcctggctctcagccatgcccctgccatgctgtctcttccacttccttctaccccacaactccttccctgtgctgacctccccccactatctcacatccagactgtctacatccagttccttgcatcttcaactcccattttcccattatctatgatggcttttgtgctccaacagcagaggcgaggagctgagacagaccccagcagaagcctaaaatatgtactctctggtcctttacaggaaaaggctgctggcccccttcctgaaggttctagagccttccgtctccctccaaggacccaccgatcaagcctgcaatctggcttctgcacaggctccattctttcagcttatagacaagctcacatcacacccatttgaggagaacatccactgccactgaaaccctgctctttatcctttatcttctcttgagatatggattcttttttatttgtaagtccagactctcaggagggagcctctgtcgtcttctctctgcattctcatgtctgcccactgttcttcttgaggtcctcacggggcagttttcgggcctcctctgaacttgtactctctgcagtgtttcgtgtcgctcctcgaagctctgtcctccctcgtgtctgggtgctgttgtcatctggtttcatttttccccctaatgataccttctcagtcccctgcactggtccctgcttgtctcccaccctcggcctccacccttgtgcccctcccctgtcacactcaatgtggacgacctcccggcaccaggactcccagcaccacccaaatcacctgactccggctcccttctccagctgcctcccagacctctctgcctgggcgcccctcaggtgcctcaacaagtccaagggaaactctccccccgccaaaattgctcctcttgcgtttcctaagccagggggctgttcaaggcactgggcatctccctgcgccccgggacacgtgtcgctggtgactcagcctgctgtctccacctgataccatctctgcctcccccttccttccgctcctgctgctactatttcagtgagcccctgcctccctatctcctacctggaaccaccacatccgcctcctaattggtctccctgcttccagcctctgccctctcccagccaattttctttcacattggggtgattcaaaagataacaatgtcttctcattccctggctcaaaaaatcctcccaagaattttcaccgcatagacagtgtgtgtgctaaatcaagggattaactaccaaggtgggggttccagaccatttcgatgtcgaaaaggtctgctgtctgtaggatcccttctttagagggttggagcctacccttcacacttacaagtctggctgatcaagaccttgtcacctgaagactgtccgtaggcaggcagagagccctgccccacagaatgcatccaaagaaacggaacatttggttcccttcctactcccggccccgcctctggatcttactggggagtcggctgcagccgggggaaaaagactttgcaacctccattatttatataaataagaacaaatgccaaggggaatgccgagtggctgggaaggaggtatgaccacccggagcagagggaggaggccaggcttcaggttcaagtcccaggcttgtcactcgcttactgactgtggcagtggccttggtttcttcatctgagaaaggggctgggagggggaagggaatgatatagctgatgtgcccaccccgagtgtggatcccagcaggtgcctgatcaatgaaatatgtcctaggcaggggcgggaggatccattgaacccaggagttcgagaccagcctgggcaacatagcgaggccccatctctacaaacaaacaaacaaacaacaacaacaacaaactgggggccggggaaggtggctgatgtctgtaattccagcactttgggaggttgaggccagaggattattgaggtcaggaatttgaggttgaagtaagctgactgcactactgcactccagcctgggagacagaggaagaccctgtctctaaaaagaataaacaagtaacaaaacaaaacaatgaaaaacaaccaaaaaaccaaactagccgaaagaaagagggacacaaccccaaggacaacagcagcggcagtagctggtggccagaccgagccccagactgcgggcaaagctggtatacgtgggggctgactgactctgaggaagccgtgaccacatcacctctgctctagacacaacacacacgcaactgaggctcagaaagggcgagccatgagctgaaggtcacaaagcaggaagaggcaggctagactggaactggctttggcttgggtttggctaagtcactcctttaggaggaggaagcacatgtttttatgactagagcctccggagccacagcttcccgacctacgtggagcttccgtctcttttctgtatataaatcgcttccccaaccccatgccaaagagaactccaaataacaacacaagcttagcttttgctttagaagtttctagaatttagttgatgctattggagctatcatgaactgatacagtccccgtggggagtgactgtatgagctcgaactggacttggacatttctccagccctctgtggttccagttgagaagtaagtgctcttcattcattctcagtaaccaggaggaaaaggtaaatcagcgtgacttagaatgatcgttccctctgtctatccccacaagcagttccctgtgcgtttaaagcagtgggtttttcagaatgtaaagatctgggggtcgctccctggccagtcgcgcatattcaatatctgctcgtcctttccctccccttccagagaccaatgtcacctgtctgtccttttctggtgcctggcccttgctggggtcacccacatcccctcccgtgagctgctgtgtctcgtatccctcctgtcctgccgctctcgctcttgctcctaggccgccttctccctcatgcatccagctacttggtttgaaactctcccctggcgcctgctctgtggggaaagccgggcttcctctgattccggatggagtgtttaaatgagatgtccacacaacccccaaggaccctctgattccaacggaattggagcctacgcctgccagacccccaggcctgagcgccagcccttcactgatcagctagcctctgcctgcaagtctaaggtctgcagaatcgagggaggccagcatggcacacagcggtccagactcgcagtgacaaggtggctgcagtgcatggagggccaccggaggctggcactggtgtctcctgcacacaacgcagggagggtgaggatggggtccatgcacctgccagggtggggatggacaagacccctccagcagggccaggcaggctgggcagccctctgtccctcaaagtccacccgcccatgacagctaagattaaagtgactgctgcgttgaagaaggagggaggcagagagacagcagccagcagctccaaaggggatcccaggcaagtgatgagcagtggggaaaccctctctccagtcagcttgtcatgtcatacaggctttcctgacctcagcaatgcggatatgaggggcaggaatacactctggggtggggccgtcctgggcaccgcagggtgctgggcagcatccctggcctccacccactccatgccaggaaaccccccgacccctgtctgacagccacaaatgtctccagacatcgcccagtgtcccctgggggcaggaccacccccatggagaaccacacgtctaaggccacacctttactccacacagcatttccagattcaccaaaccactctccgtgcttgtcccctcagattacttcatgtcatgcagctgttcacatctggcttcttggccagccagcccttcttgagaaaacaaagtctggatctatgtcatctcagcagccccctcacagatccctcaccccaaccccagaccctacgtagcacattgcctgcaaagatgctcaagacgtgttttgcaatgaacaagagaatgagcagcccgcctgctccgggctgctcacctgttctagccaccttcaccatgttggcctccagctcccgtcttcagctgagcacaggggcctgtcccaggattcttggaagcggcttcctaaggcatcatgcttttgtgttctccttctcttaccagcctttctttccctctcacgtttctctccctttctgaccatgagcagggctgcagtgcagctgctgatggtcaagatgaagatggggaatgtgccagtgaaaacctggcatgcggaggcctcacctcactcaccctctcctgtcccagcttcaaaatctttcagagcgactcatgctgccagagggtggaggagtggaccttgaaatgacaagtgacagttcctcagcagtagcatctcctgctttctcagcctggtgacctgacccggcagcacgcccactgggcacctgtgcccacctggggatggggtctcgtcctgcctgtgtgacccttcctcctgacagccatctctagagacagccagtgagggcagggcaacaggcagtgcatgttctttccacatctccatgactgattctggccaggaggaggctggctttctggatcccaccaacatcacataggggaccttttcaatctacctcctacctcccctccagtcgtgatttgattctggaatttaagaagcggagaaagagcctagttcaaattcaagaatttccatctaaaaccacagcatggagaggcccctttaaaaaccacctaacccagctctttcatcaaacagatgaagaaacttacctaaagatgttaagtggtttgcccaaattgcaaagcctgatatatgggaaaatacttccatgggaaataagaaaatgataaatttaaaaaaaattttaaatgaggctctaattcctgaaaaatgacttacttaaactggggactgggcagaaaataatattgtagaaggtagaacagcatttctttgggaggatttatctttttaagtatatagtggtcttctaccactatcctacaacaggttgcaggacaaataatgtattttaatctttgggggagtctttgtgtaagtcagaccttattcattttcattccaacaacactcgcagccattggatcctaattatcacatctaataaggctgatg[133 bp omitted]aaccccgtctctactacaaatacaaaaaaattagccgggtgcggtggcgggcgcctgtagtcccagctactcgggaggctgaggcggaagaatggcgtgaacccgggaggcggagcttcctgggcgacagaacgagactctgtctccaaaaaaaacacaaatgacattccattataagtttctgctgcaaaagaaagttgggaaatttgtttagatactttaaatagtcctaagattagctgaaatgccggtaacaaacgtgcaatgaacattttcttgggggcattcagcaacaaagtgaatcgtccttaaaaaaaatccatacaactaaagcgagtctcaccacgggaaccacaggagctgttttagtgaggggctggagtgtctgttacaggcggcacttttgcggctgttgctgcattagtcagattgcactcgagatgaatgaggaagaataaagtcttcaccaaaaacctgtcttggctaacagttctgaatttatagccctggcagtgggggcgggggctgggggcggggctgggaggaggggaagaaatgtgtcacccgctctgaatgaagttcaggggtggtgtttacctaagcaacaaacccttgtcaacaatcgctatctctggcttgccagcggaggaggtgggggagtgaggctgttttgatcaaaatccaacctgtggctgcaaagtgcccatcaacagggcactttgttagtgggaacgtgcgacctctcttaataaacataacatacacatcccactgagggccacgggtggacccaacttcttaacaggaacattgagcacatgaaaccagaaggtgctgggtccaatttccaccctcagccaaccctatctgtgaatgtctctacatgtgagccagccagggctcaactctttgctcttctgaaattcttaggcagcagaaatgaaggcatcgtgctgaaaagcgctccagaaattgcggatttatcagtgatgtacggtagtaggttggacaagtaatgattttctgaacaccaggaattagatcaaaaaagaaattccacttaagactaaaataagtctccagttgagagcagtctaggacatattcgaatggccagaagtttgtttcaatggggcctctgcgtttgtgcagcctgggagtcaacattacaatattggttctttcaagcagatcccgagtggatccatgtctgcctgttgtggcaaatcaaactcaaatttaatcagagaaaaatatatgcagatgttcaattaaaacctggagtccgcagtcttggcactgtttgcccggccctcattgtttgctaagtaacaacggttgccaggggcaacgcagtccactcccgtttccaagagcctgttgctgggcaaccgggagaatacttcccaaaccaaacaatgtcatcccggagcaaccccctctatctcacattaaccagatctaaaaaaaaccctctcaaatatgtaatctattattttcagaagccctaagagaaaggcaaataatctcttctctatagtaactgaggggaaaacagtttaccatatttgttctgaaataacaaaacccaaggaggaacaactctctctgaggtaagagggcatcacaggagggatttcaatccttcctagtactgggaggagaaagtgcccttttctccaagaggaaagaatctatttatcatcaaacaaacaatgtgggagagttcatagctgcacaagtgttttctgggcgaagtaaaatgaatcatggattaagctatttggaaaaaagtgtgaaaacagaggagttgataccaaattaaaacgacttttggaaatatcatgtacgtatggaacaagtgcaaagggaaccactgactcagcgtcagaaatgccttgtggggctttgccgggagggacttacagtatatctttgacatcactgcgccggctcttccctccctacccggagagaggaagacttttctaagaggaagccaggccacatcagatgcccccagatggcaggacacacaagggacacatatctccggaaagaggaggcacatggttgggcaatctcgacccatgaagggggaaaagaaaagggctaaactgaagctagtgcagcttttgttctgcctggagcagttcaggctgagcatggcttctctgaggctttgggaccaggagagggtgaagtggcaccaccacctttcaaggggaacacagagctctaagcagtgctcttgtttttggtgggcccagccaaggatcttaaaacattttgatagaatgagcaacatgtagctgcagcctcgatgggtcaacattttggatgataaaagcacacaatgctgatagatttgtgcatgaccaagcatacctttcaaggagctctcagcggaggtttgccctttgagacagacacagtcagtgcacagaaactgtttttttaagatatcatccaggagtcattcctagaataggaatggaatagacatgcctccctgagaagaaaggaagacagattctatactgttagaatttgaatctgtgttgcagggagatgaggaatttgaagccagactcttgggctgttaatgtatggctaagtggtgatgtggtgacaaccttgaatgctagtcctggaggtcaaatcaccagcagctggtgccatgggaggctttgcttaggggacacggctgggttctgcctggatgctgcatcccaagggaggcattgaggtgcggctgtgaggactccaaaccccatgtccagaaggatgagtaacagagatcctgtgtcattcattgatttcaataaaatatttattggatccatagcatgggcctggcattgaccagtcatcaaaacacaattccctgccctcatggagtttctattctagaccatgcgggaggataggagcatatggacagtaaacaaggtaagtgagaaaaatatgtcgtacgtcagatgacaccctatatcatatggtgacaagtaccagggggaaaaggaagcagacagaaggagtgctgggataggaaggggttgcaatttttaaagcgttgtcaaatgcttccctgggtgggctcattaaagagatgaggaaggtgtgggacggagctgtccagatatcctggggaagagcgttcctaatggagggaaaagccagtacaaaggccccgaggtgggacaatgcctggcttgaaactggagctgagtgaaccagaaggcaaggagaaaggcccacacaggccattgtaggggctctggcttttgcttggggtaaatggaagccatcacaaggtttgagcccaggaatggcctggtttgacttgcattttaaccaggcccctctggctgctgggttgagaataggggaagaaggaaaagggtgggagcagagagagcaatctggaggctaatgtgataatctgggcaagggaggggggcctggctgtgagccatggaggggcaaagccgtcagactctggataaacataggaggtagagtcagccagatctgctgacgggtcaagggtacctccaaggtttttggcaactaaaaggatgaggtcaggaaaattacccaagaaaaaggcctggagagcacttgggagttgagttctgaaggtgtaaagtgtgagaggctcctagacacccaggttgagatgctgagaaagcaggcagattacataagtctcaggctgaggggtgagctggagccatcagtgtatagagaatgcaggctggagccatcagtgtatagaatatatgaactagagccatcaatgtatagataacatagctggaaccatcagtgtgtaggggacatgacctagagccaccagtgtctagaggatgtgggctgaagccatcagtgtatagagaacatgggatggggccatcagtgtatagatgacatggctggagccatcagtgtatagagaacatgagctagagccaccagtgtatacaggatgtaggctggagtcatcagtgtataaatgacctagttaaaaccataagactatctgggctcaccaaggaagagcagagagaagaggcctagggctgagttctggggctgtctaccatttagagatcccaaagaagcaggagcctgaaaagaggccaaagaagtataagcaagtggtgtcctgagaaccaagtgactctggggctgagtggtgatcactggaatcagcaaagtggaggtcaccagtgattgtgacagaggagctccaggggaaaagtgtgtgcaaaagccacagaggttggagcaggttcaagagagccccaagtggagcagaactggagacaggaggaccagatggctcttttgaggaatttttgctagaaagataggaagaggaatggggaggcagctggaagaggaaactgagagcgggtttctgaaaatgaaagaaataatagcaggtaggacctaccaggagggaactgggataggagaaagaagggagacttgcaagtggatgttctttcatggatgggatgggatgggatgtggatgggatgggatgggatgtggataggatgggatgggatgggatgggatgggatgggatgggatgtggatgggatgggatgggatgtggatgggatgggatgggatgggatgggatgggatgtggatgggatgggatgggatgtggatgggatgggatgtgaatgggatgggatgggatgggatgggatgtggatgggatgggatgggatgggatgggatgggatgggatgggatgtggatgggatggaatgggatgtcctgcagaacacaggtgggcttggccagggctaggtgcatggatatgcatccaccagtacaggagagaagacagagtgtccaccctggaaggtgacaccaagtcatagtccttctggaggggggtcctggtccccagtcccattcttcatccatggaatccctgtgtttactcctcgccagcctcaatagctggctgctgggggcctccactctcagcagggtggacgggcttgaagccacacgatagggcctgggtataaagtatgatgacctaggtccacagacctcacatcagagcctccagcagaccctgggttcatagtcacatatgggctccatgtgaccaatacttgcccccaccccatggtcccacctcaatgcctgacagaagccccactcctcaggtttatgcacatgatttgcctttttcactgctttctttttcttttctagacacagggtcttgctctgtcacccaggctggagtacagtggttggatcatagctcactgcagcctcaaactcctgggccctcagcccagtgattgtcctgccttagcctcccatgtagctaggactacaggtgcacaccaccacgcctggctacttaaaacaaacaaacaaacaaattgtagtagcaaggtcctactatgttgtccaggctggtcctgaactcttggcctcaagcagtcttcccacctcagcctcccaaagtgtgggactgcaggcgtgagcccccgtgcctggccctcactgctttccttatggttactccatacctcttttcaaatttgccaaatggctaatctttccacactcgagtattattagaaatgagttttaatatacctatttttcttgctatgtcaacgtacaaacatgcatccttaaataagaaagtgttagagtcacatattaaaaatgcatttcttgctaagtcatgctcgaattatgcaagattgcaaggaaatttaatgcaagacaaatgagtgaggccaggaatcttgctgtgagagtttgggaagcagagctccctggctccagacaaggaatggactcagcctgacgggaggaggtctcgcctgtctttgggagggaaagatcctgtcggtacttttaagtgatcgtctatctttgaggcacagacatatctcaattggcccgggacagaaaatcaagccaagtcagagatcccctcagcaagacccagggatctctgaagaaatgaaaatgaagcgaagaaagacaaaattagaaatatttattccatccgtcatctctttgcttgtctcaaatgccaccatccaacccaatgagaacgacaaaaggacattctatttctgtccccatgaaagtttcaaccccaaagcaaaacctcagtgtgcgctgagaagatgcagcaaaagggtctttttgttaaactcattattagaattaaacccaaagagggaaatgttggaggtattttaggtttttaaactaaattagtcccaattaattctaagaagatacactaaaatcaattctgttttagaaaggcaatttaatacaaaagcttgaggggaaatgttatttttaaaatgtaaaaaggcaccttaaaacctgtaaaatattttaaatggctttcctattccatcaagttttgagaggggttttcatttttctcaggaaacattttctcccggtgtggggttggggatgacttcagacagggcctgaaagcagcgagcaactcacgctgtccaggaggggcgagaacaaaccctcagctttgtctggttctgtttttggtgtctccattcccagctccgtattaagtcagttcccaaatccgagcaaaagataattttggataaaaaaatggaatgttctaactccgcctgagagatggaaagagaaacagagatgagtctgatgaaacagaactcaaatcaccctcttcctgacccaccgcttctcttctgattcaactgtagatttggacaaattgccacctttcagacctttccatgttccaatattctttccatttgtcctggcttccagaagccttggcggcccaagtatccacctgggtgctgggtgaccctgcctgttgctgctcttggaaagcatgtttcacttctgcatacattttaaaagataaatatttgggccaggagcagtggctcatgtctgtaatcccagcgctctgagaggctgaggtgggagaattgcctgaggccaggagtttgagaacagcctgggtaacaaagcgagacctcgtctctagagaaaaaaaattaaaaattattcgggtaaggtgggtgtgcctgcggtcccagctactcaggaggctgaggcaggaggactgcttgaggccaggaggtggaggatgcagtgagcaatgattataccactgcactccagcctgggcgacagagagagatcctgtctctcaaaaaagaaacatgaagtcttccttccaaggacataacaaagaaaaaagagaaaaaaaaggcccctctctcttcagtgctgcctacggaggtggcagctgtctcctcctcagcatcatggccgccctcagacccctcgtgaagcccaagatcgtcaaaaagagaaccaaggagttcatctggcaccagtcagaccaacatgtcaaaattaagtgtaactggaggaaacccagaggtattgacaatagggtttgcagaaggttcaaggaccagatatttttttttcttttttgagacagagtctcactctgttgtgcaggctgcagtgcagtggtgcgatctcagctcactgcaacctccgccttccgggttgaagcaattctcatgcctcagcctccagagtagctgggattacaggctcccaccaccatgcctggctagtttttgtatttttattagagacggggtttcaccatgttggccaggctggtctcaaactcctgacctcaggtgatccaccctcctcagcctcccaaagtgctgggattacagacatgagccaccgcgcctgcaagggccagatcttgatgcccaacactggtcatgggagcaacaaaaaacaaagcacatgctgcccagtggcttccggaagttcctggtccccagcgtcaaggagctggaagtgctgatgtgcaacaaatctccctgtgctgagatcgctcacagtgtttcctccaagaaacaaaaccatcgtggaaagggccgcccagctgccgtcagagtcaccaaccccaatgccaggctgcgcagtgaagaaaatgagtagacggctcatgtgcatgttttgtgtttaaataaaaccataaaaactgcaaaaagatatataaaaacaaaaaataaatatttgaaatatttccatccaaatggaatttcaaaacaattaaagatggaaagaaggaaggctgaatggatgaaagccctctgaagcttactgtagagtggaacgatgaagacacagttgcatttctgtgtaagtcaaattctcttttttaccgtgcaaatttcatggttaagatgaggttgaatgcggacggctaataccagtaatttgggctaagcgctcctcttccgggagtctgagccatctgaattggctgtttacccagctcatactgatcaggaagtatctgagagggtgaatgcaccaataaaaagccacccagaccctcctctccagcaagtggaaagtgtgtgtctcgtcctcacacaggaatgactgtagaggaccacagggcgacttctaggcagcccccagacaggccggccctgggtagcaggaactcgttctgccccagctgaggttctgggcctcatcactaatgacccacagcagccaaggtcagccctcgggaagatggaaaatgaatgaagggcagctctgcccaaagcggcggaccaggtgggcaaacagagagccggggttttgtagcaggggtgggggtgcggtacaggaacagatctggagcttgtggcaggagttcaggtggaacatcaggcggggtacagatgccacagtgtggaggaagctcctcctctcatcccaagctagccccttcctaacctcaagtcaacgagaagagaaggtgggctagaacctttccaccttcctcttagcacccggcctgtgccggtgcatctcctcaccccacacagtgccctgggtacaggggctggggcttgaagggtgcccataacacactccctcagagcctggacactcagccatcgttcattcattcaacaaacacagtctgagcatctgccatgtgccggcttcaagtgctgaggacacagcagggaatgaaacagattgagtccctgaccatgtggggctgacccctcagggagagacagacgacaccatggacacagaacagcaggaggtgacaaatgctctgaagaaaaatacactcaaatgcacaagtggagtgcggcatgggccaggggcaacaaggtgacctggggcagtgacaggacagaggcagagtgaggtgaggaaagtgtcgccgctgagaaggctctgccagggatggtgctcggcaaggctgaggcacacgggacatgtggggtcacacgggtcacgtgaggaggccaccagagggagctgggggaatgctgggggttgaatgttgtgtccccttaaattcctatgctgaactcctcaccccaaggcagtagctttaggaggtggggcctttgggaggtgattaggtcatgagggtgggatcatgccctcccttatggaagggaccccagagagctctctctggcttcccaccatgtgatgtgaggacacagcaagaagacagccatctgcatcccagagggaagccctcaccagaacctgaccctgctggcaccctcttctcagacttcccacctccagggctgagagatgtgtgtctgttgtttacagccacccagtctatggccttttgctgaaacagcccaaacagattaagacaggaggagaaggaggaagaggagaaagaagaggaggagaaggtggaggaggaggaggaggaggaggagaagatggacttagagacacaaggaggccacagtggagtgtttggctttcgctctgagtgtgctgggaagctactggaaggtttagggcacagggacacaatctgacagatattttggaagtatcaacggtcaatggaagcaaacgtcagggctggacaaccaggtcagaggtgacaaagacttacgtgatagcagtgctctcatttgggagacacctgaagacagagccagccaggtttgctgacgggtttgacataaagggtgaaagaaagagaggagtcgaggctgacttaaggcttggggctggcctgagcacctagagaatggagctgcccggtgctgagctggggaagcccgtggtctggggagagacaagtgtgaggtcgaatcaggcacccagttttgggtgacagaagcctcagatgcccatcagatgacacccacatgcagctgccacctaggcagctaggtacacaagtccaggattcggggagtgagccaggctgcagacactaggacactggaggttctaagatgcatttcaactcttgtacctcggtgagatcaccaggaaagcaggtgtagataaagcagaaaagaggtcccttctcaagttcaaaggtcatgaacagttggaggatctggcataggggacagaggagaggaagaaagcagagggaatatcgagctctgaaatacacagcgtcacccctttacttggctttcggagcttggtgttcacaaaaaattagaaacgaggttgggggcggtggctcatgcctgtaatcccagcacattttgggaggccaaggtgggcagatcacttgaggtcatgagttcgagagcagcctggccaacatggcgaaaccccatctctactaaaaaataatacaaaaattagccatgcgtggtggtgcatgcctgtaatcccagctacttgggaggctgaggcaggagaatcgcctgaacccgggaggctgaggttgcagtgagccgagatggtgccactgtactccagcctgggtgacagagagagactctgtctcaaaataaataaatacataaataagaaacaaacgttcatcaactggaataccattaactaccttacggtgcatcctagctctaaaacaggaggctaggcgagggtgcctgggtccggtgcctgggtccagttcctgggtcctccagtttctagctgggtgacctcagccagggacttaaatctttctgcacttccatttctttgtccataaacggagaaaatacttctatctgtgttgggtggttgtgttaaatgagaggagtcctacaaagtgtggagtttaatggccagcccagcacacggaaaatgcccataaatgttcattagcgtcatcgttgtaattcacaccattataacgtaacccacataatttactgattttttgcagatttaaatatctgaaactaaaagcagttatgctgtttgctatttgtgatttcaaaaactcttcgctatttgtgatgttgctaagccctttagggagtgcctcctgctatgagctatattcattccagggcatatttgtggggtttgtcattttaaccaagtacttaatacttgtttctctcccagcatcttgccaaatgtggcagctctccttctagatgaacactactgcattactgttatagaaatgatattttaacatcaactcccttttcccttttcttccctagaaatccagtccttccatgagacctcggtacacacagaactcctcctaccacgtgcaaccttattctcggctgagcaactcataaatcgcataacaaaaacagtgattgatgcggactgtgtttagtgccatccttgccggtgagagggagtgagccagcaagcttccttaaatctctttagttctccaaaaggagaggccatttgccttctcatctatgccgcaagtttctggggcttgcatcattaacctggtggctttgccaattccttcgccagtgctgggtcaaagacaggcaagggcaccagggttagccatgagtgtgtgccaggggctgaatgcaaaacccgggagcactggtggctggggcaggtgggctgggctctgccactgcctcccccagcccacccaagaggggcgtgtgcctctgcaggaaatggcctccaagcatttctcaagacttacgagatgttcaaacctacacagtcagagacaaagagctagctataagtggggtctttttcccctcctcaaaattcatcctgcagaagtagacatgtgctaaacagtgcatggccacacaaatgcttggataccaatgttcacagcagcgttgtcctaatggccccaaagtagcaacagcccaaatgtttgtcaactgatggatggataaacgaaggcggccgggcgcggtggctcacacctgtaatcccagcactttgggaggctgaggcgggtggatcacctgaggtcaggagtttgagaccagcctgaccaacatggagaaaccctgtctctattaaaatacaaaattagccgggcgtggtggcacatgcctgtaatcccagctacttgggaggctgaggcaggagaatcgcttgaacccgggaggcggaggttgcagtgagccaagatcgcgccattgcactccagcctgggcaacaagagcaaaattccatctcaaaaaaaaaaaaaaaaaaaaggaacgaggcactggcacatgctgtaaacggatggacagtggaccctgaaaacattatgttacgtggaagaagccagtcacaaaaggccacatagtgtgtgattctgtttatatgaaaggttcaaaacaggcaaatccacagagacagaaagtggattcacagttgcccggggctgggaggaggaagggcaagtggctgttcatggcaggttcagggtttcttcttcttttcggagtgatgaaaatgttctgtgaagatagtatactaagacccactgaaccatacacttcaaatgggtgagctttacggtatgtaaaacagatctcagcacagctgtaaaaaaaaaaaaaaaaaaggtatattgacgacctgtccccagtggcattagtttaagtcataaaaatttagaaacaaatgttcatcaacaggaaaatcattaagtaccttatggtgcatcctagctctaaaactatgctgccattaaaaagaagaggtaccgtctccaagaaagaaagccaacatctgcagtgcctggcacacagtaggctctcaaatatttgcagaataaatttatgttgaaaaaaccccagctatacatactataaaataggtaaaggggccttaaaaagatctagaaggacacaagttatatgactaacagtgcttacctcatatgaggtgggatagacagaaagacgaaaagagaaattttcatttctgaatctcctgctgtagatggtggtccttcccaggagaatgttacttgtattacttgcatatcattttattttttgagatggaatcttgctctgtctcccaggctggggtgcagtgcacaatctcagctcactgcaacctccacctcccgggttcaaactattctagtgcctc[134 bp omitted]cggcctcccaaagtgctggaattataggcgtgagccacggcgcccggccattacttgcatatcattttaaaagttgtaattcattggtaaacattctaagacatgcaggttcctgtaaattaccaaactgtaatcctgtaaattaccaaacagaatggctgtttgtgcagggagtatcactgcgatttagtgtacttggtctagagtatgctgtcgctcttacaaccagaggttttcatgttaattcaacatccatcatgaagagaaaatataccagacaaacaaactgtggtaggatcacacaaggactgtgctccagcaataaaaggaacaaacgactgacacacgcaatgacagaatgaatcccagaggcatttatgccaagtgaatgtagccagtctcaaaagctgcacaatgtatgtttccatttatacgacattctggaaaaggcagagctatagaaagggacagcagatggtggccagaggctaagaatggggccagggtctgactacagagagaggttggacttgctctccatcctgtttgagatggaggttataagaatctgtgcaagtgggc[139 bp omitted]tggtggctcgtgcctgtagtcccagctacttgggaggccgatgcaggaaaatcacttgaaccagggagccggaggttgcagtgagctgagattgcaccattgcactccagcctggcaacaaagcaagactctgtctcaaaaaaaaaaaaaaaaaagtatgcaagtgtgaaaaaccatagaacagcaaacctaaaaaggcaaacacgactgtatgtagatttaaaatataaattaaaaaaaaaaaaagaaaaaccaggtgcatctactgagtgcccagccccattctaggctctgaggattctgtttttttagggatgggtcttgctctgttgcctaggctggagagtgcagtggcaagatcacaactcactgtagcctctaactccagggctaaagcattcctcctgcctcagcctcctgtgagtagctgggaccacaggcacatgcctggttaatgtgtgtgtgtgtgtgtgtgtgtgtgtgtgtgtgtgtatgtgagagagagacagagagagagagagagagaaggtgaggtcttgctttgttgcccaggctggtttcgaactttcagcttcaagcaatcctcccactttggcctcccaaaatgctgggattaaaacgtgagccacgacacccagcctgaggattctaaggtgagcaggtcagatgaaagtgctgctctcagggtgccagtatccttgtcaggcaagaatacacaaggttccagatacacaaggttgttcagtagagatccgggctgtggtgcaaggtgattgcagagggatagagccaggggtggtggtggagagggctcccctcttgatagccagttatgggtggcactaaggatggcactgagctgggacctgacagctgcaaagaaggggccaaccttgggaggatgtgggagagagcagcctgggcaagaggaatagctgtgcaaaggtcttgcagcagcagaggccctggacaaggtcagatgtctggagttttaaaattccaattgctgtcggggctcagtggcttatgcttgtaatcccagcattttgggaggctgaggtgggtggatcatgaagtcaggagtttgagaccagcctggccaacctggtgaaaccccatctctactaaaaatacaaaaattagctgggtgtggtgatgcacgcctgtagtcccagttacttgggaggctgaggcaggagaatcacttgaacctgggaggtgaaggttgcagtgagtcaaaatcatgccattgcataccagcctgggcaacagaacaagactccatctcaaaaaaaaaaaaaaaaaaaatccaattgctaagggaagccccaggaggctcaacccacaggcacaatataatctgacttacatcttttaaaagagcactcttcttagattatagacagaaagagtgaatgcaggaaaaccaagacaaagacattcactactttaaaaaagttcataataagtctgcttcccggccgggtatggtggctcacccctgtaatcctagcactttgggaggccaaggtgagaggattgattgaggccaaccaggccgaaaaggaagaccctgtctctattttaaacaaataaaaagaataattaattatgcttctaagacctgtctgtggaaccggggaaggaatcatatcattttataaacaaaccaagtaacactaagcccattgcatgaaggattaaataattaagcatttagttaacatgaaagtaaatgatggcttctatacatttttaatgcaggtaattatactctcagtaaatcatcacagcacacaaacattagcatgcttattaattcagtgttaattgctattggcttacatgtaccattatccaaaaattaaataatttgagtgtacactcacttttttaaacaggtacatataaaggtagatggagggctgggcgcggcggctcatgcctggaatgccagcactttcagaggtcgaggagggtggatcacctgaggtcgggagttgaagaccagcctggtcaacatggtgaaacaccgtctctactaaaaatacaaaaattggccgggcgcgttggctcacgcttgtaatcccagcactctgggaggccgaggcgggcagatcatgaggtcaggagatcaagaccatcctggttaacacagtgaaaccccatctctactaaaaaatacaaaaaattagctgggtgtactggtgggcacctgtagtcccagctactctggaggctgaggcaggagaatggcgtgaacctggaggcggagcttgcagtgagctgagatcatgccactgcactccagcactctagcctaggcgacagagtgagactccgtctcaaaaacaaaacaaaataaaacaaaaacaaaaacaaaaattatctgggtgtggtggtgcacacctgtaatcccagctactagggaggctactagggaggctgaggcaggagaatcatttgaaccaaggaggcagaggttgcagtgagctgagatcgttccattgcattccagcctgggcaacagagtaagaccctgtctcaaaaaaaaaaaaaaaaaaaatggtagacaggggaaatggaccagatgttgaatctagtttggttatagtcattgctggggattaatatagtaagaggagggtccttctctcctgaattgatgtctatcaggggttggaaagttttctttttttctttgagacagagcctttctctgtcacacaggctggagtgcagtggcgcgatcacagctcacttcatcctctaactcctgggctcaagccatcctcccaccacagcctcccgtgtagctaggaccacaggcgtgcaccaccactctcagctagtttttgtattttttgtagagatgaggttttgccatgttgcccagactggtcttgaactccagggctcatgggatccgcccactttggcctcccaaagtgttgggattacaggtgttagccactggaaaactttctataagggccagaaaatacacatttttggctttgcaggtctctgttgagactactcaactctgcctctggacagtaggaggagtgagtgtggccgctgcactcagcgcttttcagagccatgctagagcctggggcaaagaggaaaaagaagcagcagtgctgatcctgtctttatgtaaaatttcaacattttgctcatcatggaatttttttcccattatttttttgagacagggtctcattctgttgcccaggctgcagtggcacaaacacggctcgctgcagcctcaacctccctgggctcagggagtacgggcacgtgccactacccccagctaatttttgtattgtttgtagagacggggtttcaccctgttgtccaggctggtcttgaactcctggcctcaagtgatccacccgccttggcttcctagagtgctagaattacaggcatgagccactgtgcccggccttcatcatgaaattttttggcatttattttgattttttaaaatactgcattaaaacattgtgtatcttgatgactgtggatttttgtaggcactgccttaaattttgcatcccaggcgagggcctcactgcctcatgctagttctgaccctggtgctggtgctgttccaataaatctttatttatggacactgaaatttaatttcatatcattttcatgtgtcacaaaatattttgtcttgtttccaatcatttaaaaacgcaaaaaatattctcaactcgtggaaactaaaaacaaaaataaaaacccacagtagtgtgctagatgtagtctgctgacccgttttttttttttttaatttttattcatttatttatttattctgaggccgggtcttgctctgtcatccaggctggagtgcagtggtgcaaacatggctcactgcagcctccacttccagagctcaagtgatcctcctgctcagcttccccagaagctgagaccacaggtatgtgccaccatgcccgggtaattttttaattttttgtacagatggggtctcaccatcttgcccaggctgtgacccctatcttggatggcctttgggggaacatgtcttactcataattataggcagcggaaaatgcctgctagcgagtaggcactcaaacgtgtctgaataatttagtcccattttctccattcttaaattactgtttaggttgctttacattctcttcccagccccagatctccaaatacaggagatgagcacacgtgtccagggcaccccagacctcttgggcagggagaattctcggcagagaagaccggatatgggagtgtggtgtgggaatcgtctgtgagtgctaaagaaccggtcctccacctgccccaagctttccattaggctcaaaagcagagttagcccagttaagcgcatggaaactaaatgagttcgctgtgcattgttcagctatacatgaccacaggcaagataaatatttagggtctttattaaagctgtgatcctctgctttagcaggacagcgtagggacttactagaggcaaaccataaaaagcatatgcctcctagtaaagtaatgctgggaaatatgacgagtcaattactctttatcattaattgtggtaaaatgtgcataatgtacaatttaccattttaaccatgtttaatatacagttcagtagcattaagcacactcacactgttgtgcaaccatcacctccatccatctccagaacattctcatcttcccaaattgaaactttgtccccatgaaacactcactccctaccccctccccagcccctggcacccaccattctactttctgtcgctatggatctgatgactctagggacctcctaggggtggaatcacactggatttgtccttttttttctttctttctttcttttttttgagacagaatctcgctcttgttgcccaggcaggagtgcagtggtgcgatcttggctctctgcaacctctgcctcctgggttcaagtgattctcctgctgcagcctcccaagtagctgggattacaggtgcctgccaccacgcccggctaattttatatttttagtagaggctgggtttcaccatgttggccaggctggtctcaaactcctgacctcaggtgatccaccacccaccttggcctcccagagtgctgggattagaggtgtgagccactgcgcccggctggatttgtccttttgtgtctgatttctttcactgagcatgatgtccttaagcataatgcataatgtccatgttgcagcctgtgtcagaatttccttcctttttcaaggctgaatagtattccattgtatagatggatcacattttatttatccattcatttgttggtggacacttgagttgctgccacattttagctattgtaaatcatgctgctatgaacatgagtgtacaaatccctgtctgagtgtacaaatactgttttccaaagcagctacactattttgcacacctaccaacagttcacatgggttcagttccaatttttccatattcttatcaacatttttctgtctttcttcttttgggtaacagtcatcgtaatgggtgtgaagtggtatcttattagggttttgatttgcatttctgcaatgataactggtatgaagcacctttccaactgcttattggccatctgaatatcttctttgaagaaagagaaatatctactcaagtcctctgcccattaaaaaatttttttgctgagttacagaaattctttatctattttgaatattaacctcttattagaaatgatttggaaacattttcttccattccttgggttgtctttttactctgttgctactgttctttgatgcacaaaagttttgaacgctgatggcctaatccttctgtttttccttttgtcgtgagtgcttttgatgtcctatccaagaaatcattgccagatccagtgtcataaagatgtctccctatgttttctgctaagaattttacagttttagctcttatgtttaggtctttgatccatt[135 bp omitted]acatagtgagacctcgtctctataaaaaatttaaaaattagcctggcatggtggcatatgcctgtggtcccagctagttgggaggcagaagcaggaggatctcttgagcccaggaggccgaggctgcagtgagccatgattgtaccactgcactccagcctgggtgatagaacaagatcctgtctcaaaaaaaaaaaaaaaaaaaaaaaggcaggggagatccaatttcattcttttgaatgtggaaacccagttttcccagcatcatttattggaaagactgtatttaccccatcgaatgatcttggcacccttgcaggagtaaaatacggccatgagtcgcttcctgacagggatacgttctcagcaatgcaacctcaggcaatttcatcattgtgcgaatatcacagagtgatacttacagaaacctagacgctacaacctacgtagcacacctgggctgtatggtataacctattgctcccaggctacaaacctgtctagcatgtgactgcagtgaacagtgcaggcaattgtaacacagtggtaagtatttgtatctccaaacatggctaagcatagaaaaggtacaggaaaaatacagcattataatcttatgggatcacttgtatatgtggtctgctgttgacggaaatgttatgcatggcatgactgcattataagcaaataattaaagttaagtaataacacacaagaatctaatcttgccggaaagggcactgtaaaagtgaattgcaagagaagctcacaggaattagatgacttctgtgtctcccctttgacagtaatggatgcatccacgcacacggctcattcctgttttcagtgatgcgcttccttactattatttgcaaagggaatttgtctgttctgaccacacaactctacagagatacaaacatcacatgggcacctctgccttttctgtttactactaacgtagattgtcatgtaatttttgcccttccatgcctgttcttctgaggagaaattcccagtgttgagcagattttgaaagagatccagactgatgaaagattaaaaaccactgggctacagcagtatgtctttttttttttaatcttttaaaacttaaattcacaaatttgaggactccaattcagacgagcttcgttgtataaaccaggcagatctgtggtctttagaagaaagtgacagaatcagttcacttcctgggtggggactgagcacaggcagatggtcgcagcgggtcagaagccacaagctgcagagacagactcatgatagacagggcgacaggcataaccttcacaggggcgaagcgagacgcacacccgtctccagcagggagccacagtccacaggtggctactcctccctcccactgccctgtatttaggaattcaaacagcctgggaagggactgtgctgataattggctctgctttcaaagaacacttaggagataattaacccacagtccaccaagcccaggaattgaggatcgaggatcagaggaagcccaggagggagatgcctgccagaggcgagtaaagggacttagagagaagtgcagttttttctagcatccacccatccaacccaaggaagcccatctgatttaccacatctagccagtgaccttgatcagttccacagccaggcattaaggcgagtccccactaactttctcacctcagagaagcccgattccaattctagcccctccctggactctgtcagtaattcctagcaatgccttcactctaaaaaatccagctacaacaaaagattcagatgctgcagaatttattttgatttggaggtttcagctccaaatcaaagggctgatatcatggaaatagcttttttgacagctaaacagaaattattttccttgattagccatggcacattcgcccttcttaggtggacagcgtgttttgatacgaaggtgatgggttacaggtgctgggtttctccacatgggcagtttctccccaggagtctcactccttacatcatcatctagagcagtaattaatttcagaaaccactcctggctgccataagctgcacacccacttccagaactggcttaacccgccaggaagccacagtcctcaagggacagtcacccagagctgcatgttggtgagtcagagacgagaacaaagaggaagcaatgacccctgaacacagagcccttcccagcccagagtgctgctctaagcctaacccaggctggccagggcctgaaagacaaagaagaatgccacagagaagggccagggcactacagctttttttttttttttttttttttttgagacggagtttcacttttgttgcccaggctggacagcagtggcgtgatctcggctcactgcaacctccgcctcccgcgattctcctgcctcagcctcctgagtggctagtattacaggcatgtgccaccatgccccgctaattctgtatttttagtagagatggggtttctccctgttggtcagactggtctcgaactctcgacctcaggtgatccacccgcctcagcctcccaaagtgctgggattccaggcttgagtcaccatgccagcccagcatttttttttaaaggcacagttctcataggtataagaaggcaacgaaattcatcctgcaagatggatgtagccaaagactcttctttaattacaacaaactggagaagataacaaagtaaatattattcctctctctcttagagaaagcaaaaatatgttaaacaccattgaagagcctaaggggttttataaacctcaaaatcagcatcacattcatatacacatgagtactagtcacatatagccaagtaatgtgcgttagaccagggggtggcaagctttttttgtaaaatgtggaatagtaaatattttaggttttgcaggtcaagcgctcgctgtcaagatgactcaaccccatccattgtagggtgaaatgactgtggctgtgtgccaataaaactttatttatggttccagttttagtatatttgctgctgaagcaagcacaatttatggacactgaaatgtgaatttcagataattttgtatgtcctaaaatattcttcttttgatttttccaactacttaaaaatgtaggaaaaaagcattcttagttcatgggctgtacaaaaacaggcagtgagttggatttagcccatgggctagtttgcccactctgtattagactcagatgtttggactcatgtctttaaaacagagcctaaaataactccaaataaataaaagggcaggtatcaaatagcccatgtaatgacaaataaccacgctagaaatctgcgtccagcaggtcagggacactctgggggtgaagaccaacactcctgtcctgtctccatctcagtggcggaggatgtggggttttgggcagtctctgaaaagggagtgtgcacgggcaggagctggagcaatgtcacagggaagggggaggccagccctcatgtcctctggattctgaccctgtgctatggttggaatgttgtgtccccccaaaactcacatgttgaaacctaacccccaatatgacggcatctggaggtggggcctttgggagatgattaggtcatgagcatggcacccacaggaatgggattagggtccttgcaaaagaggccccagagacctcccctgccccttccatcacgtgaggacacagctagaaggcagaagccgaaccagaaagcaggccctccccagacactgaatctgccagtgccttgatcttggacttcccagcctccagagctgactgcaacacattcctgttgtttagaagccagccagtctctaatatttttgttgtagcatctgaatgaactgtcaccctcccttccctccaccaccctgtgtagctcttacatgtgctggggaccttcatgattcagggtctttgggcatttcacagaggaacagaaacttgtggattagagaaaattattatatgagataacatctttggattgtttgtataagataacatctttggattgtttgtttgtttgttttgagacaggttctcgcttttgtcactcaggctggagtacagtggcatgtacatcgctcactgcagcctcaacgtcccaggctcaagaggtcctcccacctcaccctctggagtagttgagaccagaggcccacaccaccacacctggctatttttgcattttgaatttttcatagagacagggtttcaccatgttgcccaggctggtcttgaactactgagctcaagtgatcttcctgcatcagcctcccaaagtgctgagattacaagcatgagccaccatgccagcccagataacacctttgaatacaaatttctcagccgggtgagg[131 bp omitted]aagaggctcagcatcatcagtcattacagaaacacaaataagaaccaccatgaaacaccacttcacacctacgaggctggttatactaaaaacagggaaaaataaaagtgttggtgaggatgtggagaaactggagccctcactccctgccggtgggactgtgaaaggacaatttggcagttaacttgcagttaccatacgactcagcaactccactcctaggtatattccctgaagaaatgaagctatatgtccaggcaaaagcttgtccacaaatattcatagcagcactattcgtaatagtcaaaaggtagaaacaacccaaatgcccatcaagggatgaatgcataaacagatgtggtccacccatggagtggaatactattcagccataaaaaagaatgaagctctgacacaggctacaatgtggatgaactgcaaaacaatattacccaaccttccagggcttaaatatatatttatatacacacaagtgaaagaagtcagtcacgaaaaaggtcacatattgtatgattctatttacaggaaatattcagaataggaaaacccacatagacaagaagcagacttggtgtttgccaggggctgggagtaggggactgtgatcgacttctaataggtatggagtttcttttcacggtgatggaaatgttctggaattagagagtgatgatggcttcacaacactgtgaaaatcctaaaatccaccaaatgaaaaccattttaaagtggttaaaatggtaaattttgggctgggtgtggtggcgcatgcctgtaaacccagcactttgggaggctgaggctggggattgcttgaatcccggagtttgagaccagcctgggcaacatagtgagaccttgtctctacaaaaaattagccaggcatggtggcgtgcacctatagtcccagcccagaaggtggaggctgcaataagccatgatcgcaccaccccactgcagcctgggcgacagagcaagaccctatcttcaaaaaaaaaaaaaaggtgaattgtatgtgaattttatcacaattgaaaaaagaagatgacgctgagtgctggcaaatgccagccacgaagagaaacaatgatatagagactaaaagcattcctgcattcctcacctcaggagaagtaaaatgcaatattctcataattatgagaaaattaggcacgagaacgtacaaagtacaattcgaacattttcagaaataaacttcagtaacaaacaacaatatctgttggacacgatccctaacagactgtttgtgaaaatctcgagtgatgggagagaagtaggtgtggggaaatctgtttcaggaactctgagtctaagccgcaaaacgtgtttacatgagacccatcaacagaataagccgagggactgaatgaggaatgaactgcgggaggtaggcattttacaatcaggaatctgaaatgagactatgtcccagtttgggagtcagagaattgtagactttctgggccaagccctcagtgaacattaaccctggagaataaaggagcagggagtttctagaagattctacatccgggagtggggggaggaaaactgtggaggttggtgtctcagaaatcttaaaggatgttaaaaaagaaaaccatgattcactgaatttaaaataggagaaaagctcagattaagaatgaataactttatcgaggattaggtcacaggaattctggttttaaattgtttacgtagagttaaagagaaagaatttgtaccataagaagaagccaactataacagcaaggaagacattcaagaacaggatctagtggctgcacaactgagctccctcctcgggctggagagagcaggggctcaagtccctaaacccgggccatggcagcagggggtcaatgacccaagaaagcagcttgggacggagggtggccccgcaggctgcatgctgggctgctggaaggaaggtcttccgctgagaaggcagaagaacgagtgctctgctggagaataaaggtagcagagtttacagccacgcgtccagagggaattcagaggggcggggcaggccgttgctaggctcgagtccgcgcaggagtcaagggcgacaagcatgagcttgtggctgcgcaaaccagcccagcagccaggcctccccaagaggcacacgcgagcatgggcgcagctcacggtgacagaatgaggctgagtcagtcacacgtggactgtaggataggcagagctaagctgacagggaacacgttccagaggaggggccgggggagggagaggctgccagggggtttgagcacctcctaagtggcccacagaacactgtgggtgagttcagtgtgcattctcctggagggtggggacacaagttttcacgaggctgtcaaagggtccgggacctgctactctgaaatgttaagaagctaaagagtttgtgttggcctgagaggcaaggagtgggacggggacttagggcaacggacacgcatgtggtaaaaaaaaggccctgtggtgtcggggaggcgaggaggtggccccggtcctgctggaggcggcgtagtttcaggagaggacaaaagtggaaagtcacctttatagtaggaatggagcgcagatgtaagtggcggcaagctaacgccaaggggaggaagtccatcaggctcagcaatttccctgccgcgagtgggcaaacatctcacacgtgtacacaaatatatttggacacgggtgcttactgcagcattggcggtaaagtggaaggtataaccaaaatgcctataaataaataactaaggccgggtgcggtggttcatgcctgcagtcctagcactttgagaggttgagtggggcagattgcctgagctcaggagttcgaggccagcctggccaacatggtgaaaccccgtctctactaaaatacaaaaaatttgccgggcgtggtggcacatgcctgtaatcccagctactctggaggctgaggcacgagaattgcttgaacccgggaggcagaggttgcagtgagccgggattgtgccactgcactccagcctgggcgacagagcaagactctgtctcaaaaaaataaaataaaatagaataaaaggctaagtaagtacttaggacaggagtggaatatcagaccattagtagaaagaatgaagcacaaacacagtagaaagtgataaggaaagatacaggctaaatattaggtaaaagagcaggtggcagaaaagtgagaaaaataagatctcttttttgaagaagaaaaaaaaaacacacaaaaaaaccctattagtccagccatgaaaaggaatgaagcaccaacacgtggtacaaggtggatgaaccttgagaacatcatgctaaaaacagccagtcacaaaaggctacttactatatgattccattttcatgaagtttccagaacaggcaaatccacaaagacagaaagtggcttagtggctgccaggggctggggaagggaggtggggagtgactgcttaatggggacagggtgtctttttggggtgatgactctggaattagatggtggtgatggttgcataaccttgtgaatatactgaaagccactaaattgtacacattaagagcctgaattctgcggcatgtgaattacatcccaatgcaaaaaacactaaagaattcgtatgtatgttttacaggcctgtgaaatatctgaaaccatccacaccaaacttttcttagtggtgggaggggcagaggagagaggaagaagcagccagaggctctttttttcttttttacaatttggatttttttttaatgatgaaaacgtaagacttttataatgtaaaagagaagcagtcagaattatggggactacacacaggatcccaaagtcctgaaatggtcactagggaattctggggacagatcactcaggtggcttggagggcaccacctgtgtttcaaagtccagtgatgatcactttagaaaatggacaacgctgaggtcaggtggacccacgctactcagactttgtcagtgaccttatgttttcacggctatgaagtatctgcacgccagtaagtagccaatatagtggtcaccttttaaaaggaagagttgacttaaaacttgtgcctgctttgactttaacacctttacctgtgcagtcggtatagaagccagggccacacgtggctgctgagcacctgaaatggggctggtccgaactaacatttctaagacttagcacacaaaaaagaatgtgaaatatctcgacaataatttttcatataggttatatattgaaatgaatattttcaatacagttcattggatgaaatgtattattaaattactttcacttgtctctttttactttttaaaatgcagctactaggccaggtgcagtggctcatgcctgtaatcctagccctttgggaggc[135 bp omitted]gtgaacccaggaggcagagcttgcagtgagccgagatcgcgccaccgcactccagcctgggcgacagagcaagactccatctcaaataaataaataaataaaaacaaataaataaaatgcggctactagaaaattgcaaatttcacacgtggcttgtgttatgtttctttattggccggtaatgatctagaagacacttagaataaatcatctcaggataagtttaagaattcacaaatattttaagagattctattttactagaaagtaagcaaaatgatttttagatgtagatgtgatctctatctagtaagaactcatgtaattttgacaaataattactctatttggtgtcccacaaatacagttagacatggcctctatcctcaagggttttgcatggatggggtgagaaagaaaaggagacatacacagataattccttacgtggcaaaaggtaacaggtgcagactccagatggaacagggtaccataaacaatggggcaggggagtctgggcagcatcccgtcctggaccctgctggaggtggggtagggaaaatcaggcagaggtgtaaacaaggggagggtgtgtggggcagggaaggggtcaagagaccaagctgggtggagctcggggaataaagggggaaataggatggaccacttggagaaagtctacgaatgcgagtcagagcccctggactgcaccacaggggcagaggtcaggaaactaccgcccaccacccaaatctggcccagccgctagcctgtttgtgtatggcccatgagctaagaatggcttttacattttgaagtggttagaaaaaaatcaaaatcaaaatattctgtgatgcatgaaaattacatgaaattcacatttcagcatccataaataaagtttgattggcacacggccaggcccaagctctcacatgttgtctacatctgctttcaagctccatcgggagagctgagtagttgagatagtgaccatctgggcctcaaaagctaaaacatttactatctagccctttatagagaatgtttgctgatccccacttccttggaatactaaaacatcctgtgggcttcctttgctcaaataaaataaaggcactgctcaaataaaataatggcacttgcgccaatctgcagaaatatttattgaataggttcctcgaatttaaaacattttccctaccaatatttcttaaacccttggtagatatttcctcttatttgctaatgaagagtagccaacaacaaaacaaaaactaatgtgataccctgcaggtttcacattattgggaagccctgtaccagtctgtctcacccaatcaacagcagttttaaagaatgtatgctcatagttgatactgcgcacactctcgtttttgttttttgttttgttttgttttgttttgttttgttttgagatggagtcttgctctgtctcccaggctggagtgcagtggcgcgatctcggctcactgcaagctccgccccccgggttcatgccattctcctgcctcagcctcccgagtagctgggactacaggcgcccaccac[138 bp omitted]cctggcctcgtttcttataatttaatcatgttgcattaataaaatatgagttcacatgatttaattcaacgcactcctggtattccatgatgttccaccatatcatgtggtctccccctcccagggtcccccaccatcttaaggccattgttgagggcagctggaagcaccagatttggaagaacacagaacaagaggaccagcaccatacccttcatctaagggaagaaatcggaagtttactttaacagtcctgcatgagagggtctgaactggaacagtataatcagaaacagaaagggaagaatcaatacaagaccagtttgggtggtgggacctataggaagtagtgagtagaaaagagggcagtgggttagtgggggtgaagcagagtggggagaggatgagatgacccctagccttcaacactgggcaacagaggagacagctccatctacagccttggactagaccctggggaggaagaacgagcggtccaggctactcgggtttctggcaagagcagggtgcccaggctgggacccacacatctctctttcacttgggccttgcctttcttcctagaccctgggcccaaccctttctgaagcaacaaagaggggaagcaactaaggagaaaggcaaattgcatggagtttagcggcaggaaagattcctcagctacctgcccaaaggactgagacatgcattaagatatctttacccttctgagggcgtgatcatcattccaattccaccgggcttttacaaggattagaagtaatacatgtaatacaccaggcacatagtatgtacccatgggtaacatcatggcaaccctttattattattaattattattattattttagagacaggtctcaccctctcacccaggctggagtgcagtggtgcaaacacggctcaagtaactcgtgggctcaagtaatccttccacctcagcctcctgagtagctgggactacaagtgtgcaccaccaggcccagctaattaattttttgtgtgtggagacagagtcttgttatgttgcccaggctggtcttgaattcctggcctcaagctatcctcctacctcagcctcccaaagtgttgggattacaggcatgagccactgtgccaggttccctttatttttaaaacataaccttggtgatctaacaggcactacttttaaagtctggctactccttactgagggctgctttttttgcccatttgcttgattctgtggccaacgtaacactctctgctgttcttgaaaaaccctctttcttcttttcttatacaagaatcaaaaatgttatcacacagcattgaacattcttatatagatcagagaaggtgaatgactcgataaatgacgtcatacatgattttatctatgagctttgtaaccagacaactaaatgtataatttattccagagtgtctatttggaaacaataaaagaactttgctacccctgaagtttatcccagcctcagtggtttatattttgacttgcattaaaaacgacctctcctcctgatgagaactgttactggtctaactagaaatgtggggctacattgcgggaacttgagaaatgggggctctccctgcaccgagacagcgcagtgggtgcttggctgataataacacctgtaaagaggccgcaagatagagacttcagtgagatgcgttttcgtccaagttcgtcagagccacctgggcaatgatcttgagtcagtgtctctttggtggttttagcacattccaggaccaccaatactaccatttactatttttctttaacactcagctctcaagttttgaagtctgttcttcgttaaacgtgagaggtcaggagtgttatagaggggttaaagataccttaacacccacgagagactttctcctcagcctactgggaaggcctaaaaaagaactggaaaaaaaaaagaggattctgctttggcagatccagtggtagcagatccacgtgttgggaaatgcttttgagctggggaacaaagctggggaaatagatctttaagaaagggagccaaggttagaaatatttgcctacaaagtgagtaaattttatgtaactctgttaattctctgtaactgcttcctctgccactgctcgtggcccagggctgactttttggggtgaccccaaatgtatgcagctttcaaatctttcacaaactgcttgaaccacaaaaaaaaaaaaaaaaaaaaaaaaaaaagctaagggttaaaatacaacttgccctataaccttgctttccctcagagcaaaaaggagaattcattggttcaacaaatgctgagtgccacatttcgttgctgaaacaattctaatagacataacagctctatatttgttccaaattgactttttaacagagtgaaatctttgaaaagttccaaagcaaaacaagagacaaatcaagccactgcaatgggctgggacatagaattcgggatttcatattctccactgtgtactcagctcctagcaatgagactcagcagcagctctgttataaaacccctccccgctccccgaactttctggaaaaagaacttcatttgcaattttggctgggtaaaaagggaaattaattaacagtaggggtctttgattaaaatttcttttgaaatttggtaaaggaaaagtacatattgaaagagctggaatgttaattgagatcaaatcgaaaacatggagtttgaaggttattggatctcaggcacgggctgcgtgatttttttttttttaagaactgaaggtttaccatcttgatgtaggccttgccgtcctgaagagcactcgggctcatgtgtttcattcactcacatgttaaatatgaagccctatgtacaacatagcctgtgggaactgtggcaggggtagctgtctccatcctccagaaccttgtcacaatcaagaataggaaatgagacgcacaaatcactaccacctgtcgaagtggccttgcagtgctaaatctaagtgctgaggcaatttgcctgcagtccttgccacttcttgttgattagtccagcagcccccagctgggaggcaattctgttcaccctcactcccacctcaggacatctggcaatgtctggaaacagttggttgtcaccacttggggaaaggggagtgtgcttttggcaggtagaggcctgggaggctgctccacatcctacagtgcacagaacagtctccccaaccaagaataatctggccccaaatgtcaatagtgccagggtagagactcagctctagtttatattttccaacttagctcctcaatgaaaatctcaagtttccatggcaagaggggattaaagaagggtcttgagggaagagtaggattttcttcagtagaaatgacattccagagaagggataagaaagtacaagacccgtttaaagtatggcaagctcatttggagtagtgaaagggaggcaacgaaaagggagatggggctggactgaaggaagccttgaatgtgtggttacaacaaaggggaggggacagtttgtccgtttggctaacaaaagtagtaagaaagtgcccttccgttcctcctgacatagctcaaagagacatgacaaggcggttgggagaagaggaagagatcagtaagaatccagagacgacagagcccaaggtctgtgcaaagagccgcagggagacaatacaggaagtgattaggcaggaggctttggcggcgaccggaaggctggagaattattgcctctgtaacaggagaggagggctacttccagtaagaaggaccaagactccagaggccactggcactagaataagaagagaagtaggctcatgcaggcccacgtaaatcggaggaaggtggaagtttcctgaccggaagtctaggtgggaggcgccatgttgcggcccagccgctgctactgactccaccatccggcagttcgtgaaattaaataactgcaaattgatgagtcttttcttttgcatgctgagtctctccaatgagcacactcatcagtgtgaaccaaggctggcaattaattgaattatattgatttaattgaattaattaattgaattatattgatttaattgaattaattaattgaattaattaatcatatccatttccagaagtaatttttactcacccgcgtctgtcattttaaaggtctgcagtaaaaataccaggatttacacaaaagatttgctcctgagacatatcctgcttttaacttaggctctgaatatcagttgccaatggtttctaacaattttaaatttgtctagtgccttctcccctctcaactgtccacatgacgatatattaatacacgtaaatgcttaactaattataagctcctcagatgtttgatatttcaggcccacaaatattttctaaagaaatggatggagaccccagagagctcctcactgaagtccctagtagggtgaattcttcaagaaaacgaataattccttttaaaatcagaagcacatcttttagtctgttttcagtgggtctggaattccaaatatattttttctcaaggcaggctacatctgtctgtatgtattctgagaaggacaggagaggtgggaaaaaggccttcgtgttattttctttgggtttccactggcctgggtggagcccgcatacatttttgtgggctggtaatttttttggaaactgcttctaaggcctttccccacagatcaccttttggacagaaatgtatccttggaaacatggcacagtttctaaaagataaacagtttgcatttttaaaaaagtataattaagtgctgttgcagctttaggaatggacttctatatcattggtataatttcaacagttttccaggagacaggcgttcatgagtcaagccttctgcctttctgtggggacccaatcctttttcacatgggacttgggcaagtctaatctttctggttgccattggatctcactcttcatggtgctcagttcttgaagttatttcctcctttgccttttgagcctctgtccaggttctccctctacctaagagtccctttgagatctctgcttagcatggttcacaatagctgtaaggtggaaaccacccaagtgttcatccatggatgaatggggaaacacaatgtggcatatccatgcaatggaatattctttagccttaaaaaggaaggaaattctgatgcatgctacagcatggataagccttgaagacattgtgctaagtgaaataatccagtcacggaaacacaaatactctatgattccacttatatagtgtatagtcatcacattcacggggacatgaaaacatgggccgcccagtcctgaaaacatggccacacccctctcccccatctgctgcctgcagaacactattctcaagatgcagttcagatccacatcctcttttcagacctttcctcagctccagggacagctggcctccccactttgtctgccctctgtgccctgtagaaacatctagcaaagcctatttgatactgactcctcttccttgttggtctttggtctttgtaactggataggatagcactttactcaaaataggcaatgaataaatgaatgaaggatgaatgaatgaagattgtatgaatgaatgatgaacaaatgtcaggagtctgaaaagcaggtcttccggtaaatgactggacacctttgatctgacaggtaccggctgatgtgaactctaccaatgatccagtttatacttcgaatagcatccaaactttgcccatggcctccaaggccctgcaggttgcccctgcctcttctgcctctccttgctttgctcgccaggcatcagccacacaactgcaggacctttgtacctgctgcccccttcctggaaggctcttccttctgaaccccacagcgctggttccctctcctcatttcagtctcagctcaactgtcacctccttaaaaactgctggacgccaggagcccagtccgcatcacacggccttgcttttttgtctctactgttcaatttttcagccaagttcaaatacaagaagcctcttatggccaggcacagtggctcacatctataatctcagctacttgagaggctgaggcaggaggattgcttgagcccaggagtttgaggctgcactccagcctggacaagagagcgagacttcatctcgttttttattatgaattacccatcccccagtctcagacatatacacaaacacatgcacacacgtccaaaaaaactgcagagatcttagtagaaataggcttaccatatatagcacatctgggcttcattatgtaataaatgacaaataatcactatattggaccattacatgtaagttctacatatttttaatggcttttcagctttttctccactttgaaacatggactgtagcaggtgtaaatggactgacagcatttaaaatctatctgctttatgtatcatctacaggcagtggcaagtcaactgtactttttagaaagtcatggaattcacaaacattaaaaataagaataaggaattgccagggcatacaacagggttttcaaacatgcaagacctatgtatcataaaacaggaatgcactttcaggaaaaaacaactgaggtgcagcaaggccaggccgtctgctcctaagggcccaactcaagtcctggcacgaagaccaggccagtccccggctccaagtggctcatttccagactctgactgtgttggcatccaagagccagtgataacagagaagggaaaccagtcttaaaatgttctcatctgtagagctggccactccccaaaactcatcataaatgtgatgtttggggagtcatttcagagggacccatgccacaaccaagatgtaggactccaacaacttttcgtgctgtttttgttcttacgaagcacttatgtttgcagagggacatattagtacccatgagtttctaggttaatttaagggaatttcctaccctaaaacagacagcatgaggccgaccactcagtcaagcaagatgtatgtactaaacgcctccttagcatttggtcctggtcaggaaaccacagtaaaaaactgatcatcccaggccacttactacttatttgcttcatcctaataataataataataacaacagttacttttttctgagcacctattagatgccagcccctgtgctaaatagcttatagaaattatttctaatatagcaaccacacgagctattattatcgatttcacagatgtcaaaccttgccccagagccactaagctaataaacggtggcaccacaatttaactccttctctgctgtgccccaaagccctggtctgcaacacccagcactatgacctgcaacttttcctttcctctttcccctgccccattcatccagattcatccaatttgggctctactgactcagagatggcaatatgaacttaaggtacc[216 bp omitted]gaggcaggagaatggcctgaacctgggaggtggagcttgcagtgagctgagatggtgccactgcactccagcctgggcaacagagtgagactccatctcaaaaaaaaaaaaaaaatttttaagggcagggtgtcgctatgttgcccaggctggtctcaaactcctgggttcaagcgatcctcctgccctagcctcccaggtagctgagattgcaggtgtgagccaccacacccaatgcagctctcaactcttcatttctacatatgctttccccataagtgtcaaggaaaccatttgtttattcatttcacaaatatttctcaattgcctactcagca[132 bp omitted]aaaccctgtctctactaaaaatacaacaattagctgagcgttgtggcacgtgcctgtaatcccagctactcaggaggctgaggcagaaaaattgcttgaacctgggtgtcagaggttgcagtgagccgagattgcaccactacactccagcctggtgacagagtgagactccgtctcacaaaaaaaaaaaaaaaagaagttaataaaacagaagttcctgcccttactgagctgacattctaacaagaggacagtgataatacaataaatacgtataacttatggtgtgttatataggaataaatgctaaggagacagagaaagcagggaaggaggctgagagcacccattctcaagtgggtggcctggtgacatctgagaaaaggcctgaagaaagtcggagagccagccctccaaatacctgggcaaagagctttccaggcagagctggaatgagcttccagaggccagcagggtggaagtgcagtgagggaaggcatctagcttggcgatgaggtcaaagaggtattaggcttggcggggagtggagttaggggtgactttggcttttgctgcagatgagatgggagccatcggagggtttcgagctgaggggtatgaagtagaacttaacatgacgccgcctctcccagggttaacaggccccgtctggctgctgggctgagagactgccgagcaccagtggtggaatcatccgggctagatgctggtggctgggaccagaggggctggcagtggaggtggcgaggcatggtcaggttctggggaactactgaaggtggagtcaacaggatttgctgatggcttgggagagaggagtcaaggacagtcctgaggtttggcctgagtaatgggaagaagtgagttgatatgtaccaacgagtttggggggtgctttgggaggagtagatctggggggactatgacaggctcagcttggccaccttaagtttaaggtgcctgtcagaatccacctggatgtacccagcaggcagctggatagatgttttctgcagagaagagcttagaatcctaagccagtccagagcttcccaggctccagttccctataggcctgttagggcctctctctggaccttttgccactcctccttcacctacccttatccctttcgcccacttcattctgggtcttcccctatattttttttcctgggagaatccttttgctgatcttagagtttccaagaagcaagtaggtggttttcagttttttctctaattcccagtgtatattccatcggcctgcccatccatccatccatccatccatccatccatccatccaacaaaataagacctttcactacaccaggcatatgtctacatgagagaacatgagaacatgaccagcagaggagctaattgccatttaaattctagagacggagtcaaaacatctttttaaaaaatacataagcccacaaccccttacaacaatactgaaatccaggaaactctgaaaactggcaatttttttgtaaatttggcatggactcacttggtgacaaaagctggcctgaattgacatgaagttacttatggtccttctcttccccacttcgggtgaatattcatatagttcagttcagaaatacggctgtgtttagtgggaatgccctggacccatagtttcagagacaggcccacagactcgcattctcctcccctgcagtttagtgagtgtcctgacaagcaagatgagaacttcccttggtttttcaaaagtttcctattttacaagtaagtgggtacctatgggggtatactgtttaaatgtttgtaaatatttaaatatatttgttttatatttaacatatatttatatttaaattttattatatttaaatatataagtatatattatatatacatgttttaatatttcaatatatattttaaaaatatttaaatatttaataaatagatgtcaactttagaaacaaatatatattataagatgtggttccttctggccccagcattttatgagcaaaacaatcactagctactataaaaatccacaggtgccggccgggcgcggtggctcacgcctataatcccagcactttgggaggccaaggtgggcggatcacatggtcaggagatcgagaccatcctggctaacacagtgaaaccccgtctctactaaaaaatacgaaaaattagccgggcgtggtggcaggcgcctgtagtcccagctattcgggaggctgaggcaggagaatggtgtaaacctcgggggtggagcttgcagtgagccgagatggtgccactgcactccagcctgggagacagagcaagactctgtctcaaacaaacaaacaaacaaacaaaaatccacaggtgcaggggccgggtttggtggcttacgcctgtaatcccagcactttgggaggccaaggcggttggatcatttgaggtcaagagtttgagactagcctggccaacatagtgaaaccccatccctactaaaaatacaaaaattagccgggtgtgggggtgcatgcctgtaatcccagctattcaggaggctgagacaggtgaatcccttgagcctgggaggtgcatgttaagg[132 bp omitted]agccaatttaatatttttattaattataatgctaatgtaaaactaaacaattagatctaaggaataagacccagataaacaattccccagcacctgcatttctggtggacagaaccatccttagcagtacttcaatgataaacaatgttaaaagatgagtatttacatttaaatatacatcacatacacattatattatattgttgtatttaaatatacatcacacatacattaaggtaatgcgtgcccttcacgcagaaagcaaagatcaagtgatttcaaagaacttgtcctgttattgaggtaataactgtctctctcttctcagattcagtggtttataagaaagaacttaaaaaactaaaatatttcagtattgcttttcctgcaggagcaaactatttcagaactcattcccaacccaagtccgttgaactgtcacagaatcacagaacagtgatctttcccatcatacattataagttgccttccgtaccacgcctgttgatgaagaagccctagtaattcaagaacttaaattcttttcctagggaggttaccataaactcttacttctctggtcagagtaggtgagttgtcgtttctaaggttattttagagtcagttcaagtctttaaactagagcaggagaaagcacagatgcccccctcctccttatccagaaggacgggaggtaaggatctttccataagcaaacaatgtttcagggcacgatgtaaaaagataaaatacatgtcaacaatatgtacaggcaaaaatttttttaaaaagtctttgttgttttgtgtcattattattattactgttactttgttggggaactcttagttgaaacagagaatgaagcttgtacaaggtttgatacagagatgaagctgactgagagggaaaagaactcatcgaagcctgcgctggtcatttatgatacaaagcaggaaaataattgcagggaggcacaatgctaacaacaccccaaagtaggaatgaagcctgggggggcgggggtaaggcagccagccctgggtcccgagctccatcttgccctctcccctccccattcttgccgcacaaccaggaggttaaaataggaagatgaaccgcgccggcagccgccagaatggcccgggcgcttggggccctcgggggcccttgaaatagccactaggatcgggaaatccaactttcccagcggtgcagcgaggaaaaccaaaaggaacggagccggaggctggtggcgagggagcgcggaggcttctcggagggaggaaaaagaaagaaatgagcatttggggtgtgagtgagtgtgtgtgtgtgagtgtgtgtgtgcgcccgcgagcgcgctggtgggcggtgggggcagggggtggagtttaaatccacaaacacacacacgcactcgcactacctcggagaaaatgcctggagcagtttaggttctttaacaaaataaataaattgaaaaaaaaaaaaagtttcactcgcgttggtgaaacttttctcccttccagatcagtcctaagaggagagctgcggacgtgcggaggggcatcttgggggcacgtggaaagactggcggacgcacgaacccctatactcaggaatatggggtcacagggagaaggggagggggtgtccgaggcgacctgaacgcgaggatttggggcaaaaaggtgagaaacagttcccggggaagctcgctcggggagtttgggatgaaaaggtgagaagggcaagaggggttctccccagggcagacgcaccagcttttagttaaggaatgagaaaaaggttccaggggtgcccccaaattcagtatgtctgggagtccattaaaaagggggtccccgggacaagtcagatctaggaatttggggtaaaaatgagaagggagtcttcgaggtccccccgatgcaagaagtttgcgactaagagtgacagaagggctctggggtcaccccaatttcggaggtttggggagtaaagtaagaagagggccccaggtggccccaattcagggagtttgagggtatgagtaaaagaggggtccccgggtgtccccatctcagagatctggggagtaaaagtgaggagagggtccccaagcgcccccaattcagagaattcgagggtttgagtaaaagaagggtccctgggtgcccccaactcagagatctggggagtaaacgtgagaagagggtcccctggcgcccccaattcagaaaattcgagggtatgagtaaaagaggggtccttgggtgcccccaactcagagatctagggggttaaggtgagaagagggtccccaagcgcccccaattcagggagtttgaggagtttgagagacgttcccggggcgcccccaactcagcgagtttgaaggtaagcgtgagaaaggggtccccggacgccccaacctcaggaagttttgtaaaaagtgaggcgacggcaccgcacctcccccgcgttcagtcaataaggaaagtggggacgtcgccagggtccccccaaactccgccgcgcgcgcggacggggtggcggaggcgggtcccgcgggcgcaccacccggacgtttggggtgagcggcggggacgtgctgcccgccccccggcccccgaacggggtccccgccgccccccacactccccggccgggctgggcccggggcggtcgcatcggtcacctggagttcgggccgggagttcgggcagcggctcccgcggcggcggcagcggctgctgcgtgttggtccccgttggtaagtaacagtctccacggctacagtctctatggcggcggcggtggcggcggcggccgctcctcctccggctcccgccgccagccagcctcgcgcagcccgcccgcccgacggggcggggcgttgttaccggcaacggttaccaggctccgcgccccaccttcctaacggcccgcccacgctcgcctccaacgggcccccaagagggcggggcgcgagaccctacggcgttccattggctgtctgcagagtctgtcggaaggaggaggcgttcccccttgaaaaagagtgcgagactcggccaatggccgcgaagaggggcgggtcttggcgggaggcgcgcgcggctcagagggttggcgaaccggtcgcgcgcgcggcgccgtgggttggtggcgcgttttgggaaagtccagttttaggggacccaagggactccgtttaccccacaggaggagtgtgggacatgtgggaacagtctgatcaggggtcagcaaactctcgctcgccgcctgtttttcacggacccccagctgaaaat[224 bp omitted]gaggcag[136 bp omitted]aggagcttttgtggggtgtgaacctgataggagactctcttttattgtattgggcccagtattttgaactagtttaaagattggcaaactgcggcctgcgggtcaaattctgcctgcttgggtttgtaaataaagctttattggaacatagccacgcccatttccttgaacagcttggaaggctgctttgacactacaggggcggagtggagtagttgcgcaaagacggcatgtcccacgcgaagcctaagatatttactatacggtcctttacagaaaatgtttgccaaactcaccagccctcctctcaagctggtagattcagctacgagtaggacagaaacagacagatcctcatagaacttttattctagtgagggaacattgacagcaaacagaataaagaggtaaacatatagttattcgagacaaggggctggaagaataggagaaaacaacttgtactgagaaaaggcaggagattaggcttcagccccactcattcattcaacaagaaatcatattagtgagcactgattaaattgctatgtgcctgaaagtgatctaagcattttttaaatatgcaaactcattaaatcttacaatcgcatctttagaaagatgctaggcattatccccgtttttatttgttttgttttttctttttttttttttgagacagagtctctctctgtcacccagactggagtgcagtggtgcgatctggctcgctcactgcaacctctgtctcccgggttcaagtgattctcctgcctc[134 bp omitted]tggactctcaaagtgctaggattacaggcatgagccaccatgcccggcctttccccatttttcagatcaggaagctgaggcccagaaagaatgagtgaatttgcccagtgtcaaacagcttgtgagggatcggaaccctagtagtctagtgccaaagtccatgctcttgatcactagatgggtggttttcaaacatttttgaccacagcatacagcaggaaatacattttacctaggggctcagtccacacaaacatatctataactaaaacaaatgatactgtaactaaagtaccgtgaaatgatactttaacgcactctgatatttcctgttctgtttcattttaattaaaatgttgacggtgatttgctaaattgatttcatcatcttctaatttttttttttttcttgagacagagtctctgtcgcccaggctggagtgcagtggcatgatctcggctcactgcaacctccgcctcccgagttcaagtgattctcctgtttc[133 bp omitted]tcagcctcccaaagtcctgggattacaggcaggagccactgcgcctggccatgtgacagattcttaagctcaagtggtctacagtaatcagtccctttcattcaattattaatttagtcaaaaatatttattgaggtccaagtgcagtgactcagcaggaggatcgtctgaggccaggggttcaagaccagcctgggcaacatagtgagaccttatctctataaaaataaaataaattagccaggcgcagtggtgcacacctatagtcccagctgctcaggaggctgaggtgggaggatcgcttgagcccaggagttctaggctgtggtgagctatgactgtgcctctgaactccagcttggtagacagagcaagaacctgtctctaatatatatatatatacatttatatatatacacacacatatatacacacacatatatgtgtgtatatatatagtatatgatgatagatagataggtagatagatagatagatagatagatagatagatagcgcctactatttgctaggtgctagggacacaggtgtaaataaaatagataaaattcccatggccataggaaaagtgatacagtagtggcttggtgggagaagtgggtgggtggggcttaccttagatagagcagccagagatgatctccctgggatatccaacaatcctgcttggcccaagactaaggggtttcccaggatatgggaatttcagtgctaaaaccgggaaatccccaaagcgggaagagttggtcaccctgggtctctctaaggagctgacatttgaggcaacgttggagtaacgaggaacaaaggaaaatagtttggaattcgaaatccctggggtgaaagctgatgtggaagaaacagaaagcaggtccttgggcacagctggagccaatgaaaggggaagagcagtgagtgggtggggtgagtgagtcaggggatgatatgatggccatcattttattggaggccgtagggaagaagtcacgatcagactgggaaaccaatggagggtgtcttttgttgttgttgttgttgtttgtttttgagctggagtcttgctgtatcgcccaggcccacgctggagtgcagtggtgcgatctcaagttgtagcctcggggagtaaggtgaccgcctgtcctggaactgctggtcaacccgtttagctaagctagacctcttcccgctcccagccctggccagaggcggaaactgtggccccagttatctcaaaagacaagcacagagtagcaaaagacaagccaacaggtggcaaattcttagagtcctgcttttgtgcggcacatttttgtaaattaaggtgacatttacataccataaaatgagccattttaaaaggaaacagttcagtggcatttagtacattcactatgttgtacaaccaccacctatatctaattccaaagcattttcttttttaatttgtttttttttttatgatggagtcgcctgtcacccaggctggagtgcagtggcacgatctcacctcactacaaccttcgcctcctggattcaagcgattctcttgcctcagcctcccgagtagctgggattacaggtgcacgccaccatgcccagctaatttttgtatttttagtagacatggggtttcaccatgttggtcaggctggtctcaaactcttgacttcaagtgatccggcccccttggcctcccaaagtgctgggattacaggcgtaagccaccttgcccggcccccatggagggttttaagcaggggtgtgtgcggggacaggtggggtggggagtgggtggaatgtcacccgatctgtgattttattttattttgtcaattaattatttttttaagagactcttgccgggcgcggtggctcacgcctgtcatcccagcactttgggaggcc[134 bp omitted]gaggcaggagaatggcgtgaacccgggaggcggagcttgcagtgagccgagatcggtgccactgcactccagcctgggcgacaaagtgagactccgtctcaaaaaaaaaaaagactcttactctatcgcccagggtggagtgaagtgacacgatcacagctcactgcaccctcagactcttgggttcaagggattctcccacctcagccacccaagtagctaggactataggcatgtgccaccaaggctggctaaatacaagaattttttttttttttgtagagacagggtcttgatctcctgatgtcaagtgatcctccttccttggcatcccagagtactggggctacagggatgagccaccatgcatagcctaaactataattttaaaagctcagttgaggccaggcccagtggctcatgcctgtaatcccagcactttgggaggcctagaggggtggattacttgaggtcagcctggccaacatggtgaaacccggtctctattaaaaacccaaaaatgagctgggtatgatggcaggcacctgtagtcccagctactctggagactgaggcaggagagtagcttgaatctgggaggtagaggttgcagtgagccaagatcgcaccactgcaccccagactgggcaacagagagagacaccatctcaaaaaacagaaatgaaaataaaaataaaaatgaaagctcagttgagccacctcatggggaatagattgtaggagacaaaagggacagagagagatcctaggagtctgtcccagttctcctgggtgggaaagtatggtggcttggtttagggacctggtagtggaggcggacatgagtgggtggactgagggtacatttggaagaacactctagtggactagatgtggggagtgaaggataacgttttagggtgtgacaggaggtgccttgtagctggtttgtacactccgttctgctagaatgcttgtctttgaaatgtcagttagtcccaaagtggtggatataataggaaacaatttgagcacaatgtggattttgccttccttatgcacaattttgtctgcaagaaacactaggtaaatagaaaactgcacctgtctggaccaaatcgtgtaggactgcacaaaatatgcataagcacacatctgaaatatctaccagccacctcagcttcctgtgaattatgagccacatttatctatgcctagcattacaactttccatctgattacagatgacttttctaccttttcacaataactcacaagctgcaatccttcaatagcaacttcctcaagcaaacttcagccctttttcatggcaatgtggcatatttactatagtatttatatatttcttaactaaccaaaatgtgtaaaactcttcaatctcaaagaagaaatcatgagggaaattagaaaatacattaagggccaggcacagtggctcacacctgtaatcccagcaattggggaggctgaggcaggtggatcacctgaggtcaggagtttgagaccaacctggccaacacagtgagatctcatctctacaaaaattaattttaaaaacttagcagggcgtggtggcatgtgcctgtggtcccagctacttggggggctgaggcaggaggatcgcttgaggccaggagatggaggctgcagtgagctatgatcacgccactgtactccagcctgggtgacagagagagaccctgtctcttaataagaaaagaaaagagaaattgctgaagtgccacattcctgttgacataggacacccagggcagacagcgaggagacagatgaagcttaattcttgaatgaatggaggtaaggctgatattttctcctagtggactctggtccagttcattccagagacaaagctttgcctccttaaagtagccacttgaaccatgttggaggaccttgttgggcacagcttggagaggaaatagcagagctgaagtctgcagcagaagaagccacaggagtggataaccaggcagtggtagagggaaaggggtgtgcacaaggcaacacctgactcccttgctcctcttacctaaggcccaagggcaagtgacaccaaggaggaatcattttcaggatggccaactcatcctggtttccttgggactttcccacttctaaaactcaaagttgcagttccccaaaatgtaaaaagtggaattcccatgggatccagcaattccactcctaggtgtctgcccacaggaagtgaaaacttaggtcttcacaaaaacttctacatgaatattcctagcagcattagctcataaagccagaaaatgcacacaactccagtgtccatccatggaggaacaaataaacaaaatgtgatctaggccgggcgcagtggctcacgactgtaattccagcactttgggaggccaaagtgggaggatcacttgaggccaggagcttgagaccagcctgggcaacaaagtgagacctccatttctaaaaaaaaatttaaaatattagccaggcatggttgcacacatctgtagtcccagctacttgggaggctgaggcaggaggactgagctcatgaatatgaggctacagtgagctgtgatttcactactgtattctagcctgggcaacagaggctctgtcaatgaaggaaaaaaaaagaaaggaaggaaggaaggaaggaagaggaaagaaaggaagggagagagaaaaagagagagagaaagagaaagggggaagaagggaagagagggggaaaggaagggaaggagggagggaggaggaagggaagaaagaaaagaaaaaggaaggaaggaaggaaggaaagaaagaaagaacaaaagaaagaaaaaggaaattacctaggtgtattcccaaatttttggctgtgaaatgaattctttgcctcacatcaccccataataaagctgtggtaaagcttcagttcccatggaaggctagtgaggagggttaggtgtctagagacctgggtttggagttaaacaggtgaaaatggagctgttttgaaggcaaggggcacaacagagtgtttgcatgcccagaatcaccgatttgaaaccccagcatcaaatgattccaaggatgggtctctgtcacctcaaatagtctgtgagtaaaaaacataatttaagatgaggcattgagaaaaagtggatgacaaaaacctggaaacaccctaaacagcctacaataaagcactgattacccaaagcagcattcagctaaacaatgaaatattatgcagcaatgaaaaagaataagatgcaactatccgagcagtataggagaatggctacaatctacttattaaacaaaaaaagtaaatgcagtacagtgttcacagtgcactcctatttgtgtttttaaagaaagatatttatttaaaaagagtaccctttaaagtagtaccttttaaagtagtaacctttaaagtgtatatctaccagccaggcatggtggttcatgcctgtaatcccagcactttgggaggccaaggcaggtggatcacttcaggccaggagtttgaaatcagcctggccaacatggggaaaccctgtctctactaaaaaatacaaaaattaccccagaaatggtggtgcatgcctgtactccagctacttgggaggctgaggcaggaggattgcttgaacctgggaggtggaggttgcagtgagccaagatggcgtcactgcactccaacctgggtgacgagcaagaccttgcctcaaaaaaataaataaaaataaattaaaaataaaaataaaaataaaataaagtatatgtctacctacagtgtgtgtgtgtgtgtgtgtgtgtgtgtgtgtgtatgtcttatagtagatatctatctatatctgttaccctttaaagtcaatatacaaacatttattgtttactatgtgcttaatagtttctccatcattttgccataagaactcattttatcttcatgataatttttgcattattagtcccatttacatataagggaactgaatgtattcactatctactgctgtgtaacaaattaccccaaagatcagtagcttaaaacaagcattcatgatctcacatagtttttgtgggtcaggaatctgggtgcagtttagctgagtggttctggctccatgtctctcaggagattgtggccaaactgtcagctggggctgcaggctcatctgaaggctcaactgggaaaattattcttctttccttccttccttccttccttccttacttcctccctcccttcctcccttcccttcctttccctttctttcctccctcccttcctccctccctccttccctcccttctttccttccttccctccctcccttctttccctccctccctcctttccctccctccctccttccctccattccttcttccttccttccttcctccctccctccctctcctctcctctccattcctctcctctcttctcctctcctctcctcttcccttctttctcttttgagacagggtcttgctctgtctcccaggctgctgtgcagcggtgtgaccatggctcactgcagccttgacctcccaggctcaagtgatcctcccacctaagcctcctgagtagctgggaccacaagggcatgccaccgtgccctgcaatttttttcatgttttgtagagatggggtctccttatgttgcccaggctggtctcaaatttctgggctcaagtaatcctcccacctcagcctttgaaagtattgggattatgagtatgaatcaccacacctggcctattcactctttcttccttccttacctttctctgtccccttctccctccttccttccacccctttctctctctctttctttctcttctttcttctttcttctttcttttttctctttcttctttttctttctttcttctttctctctcccctttttcttctttctttctctttttctttcttgtaagaacacttaacatgagatgtagcctcttacattttgatgtgcacagcacggtattattaactctaggcataatattgtgctgcatatcttagaacttattcctctcatatagctgaaacttcatacctgttgaacagcaactccctatgggagaggattcacttctaagctcactcacatggttgccagcaggcttgagtgccagctcaagagctattggctagagatttcatttccttaccatgtaagcttttcaacaacatgcttgagtgtccttgtgacatggcagctaggacctggcagctggcttcccctaggcactcaagacagaaaccacagtctttttatagcccaatatcaggagtgacatcc[222 bp omitted]gagccacagaattgcttgaacccaggaggcggaggttgcagtgagccaagatcatgccactgcactccaggctgggtgacagagtgagactccatctcaaaaaaaaaaaaaagaagtaagtcagtgagactggatgcagtggctcacgcctgtaatcccaacactttgggaggccgaggtgggcggatcacttgaggtcaggacttctagactagcctgaccagtctctactaaaaatacaaaaattagctaggtgtggtggcgcacgcctgtaatcccagctacttgggaggctgaggcaggagaatggcttgaacctgggaggcggagattgcggtgagctgagattgtcacgccactgcattccagcctgggcgacagagcaagactccatcccacattcaagggaaggattagataagggtgtgaacaggagacaatgggggccctgggggcccatgtaggggctgccccaccacactggggtacagaaggggtcagtcacttgtccacacttacagagctggctagcaaattgcaaagttgggattcgagcccaagcagcacgtctctaaaatctgagttcttcacctccaccctgtaccatgcctcctctgcgcccttttgcagcatgcttgtatatgcagatattatttctggaaagataaaaaaatacactacggatatacataacagtagaagggaggcttaactttcatcgaagaacctttcatgttgttgagtctgtctgcattgtttttatgtgtgtttaccaagcacagatattatttttcaatcttttttttgccatagaactcgaacggcatgataaaataaaaagatatttttctgctaaaatacaaaataaaatcaaacaaaattatttatttatttattcatttattttaaagatgaggtctggctctgtcacccaggctggagtacagtggtatggtcacagctcactgcagcctcaaactcctgggttcaagggatcctcccacctcagcctccagagtagctgggactacaggcacctgccaccaccaaacccagctaatttaaaaaaaaaaaaattttaagagacgaggtattgccatcctgcccaggctggtctcaaactcctgcgctcaagttatcctctggcctcagcctcccaaagttctgagattacaatcatgagccacccttccctgcctcaaacaaaaacatttagacagcacgcttacaaggaaagaattagtaaaaccacagggccagtgaaaacgagtttgggtatgagaacggtacaaaaactgcctccttcctgggacatttccaggtctgcttgagagaatttacccttggtgattgttaaaactatttttttttctcccagacgagcttctccctaattgattgtttttatttaactgatgactgttaattaaccagctctattagaactttacaggccattcacgcactgatgcgtagttttaacagcctcttacttggtacaaacctgagtctgagcatctgatcctttcaagagtagcataaaaggacaatttccataatgatggggcttctgaatagcggattttgtgtaaaaagcacctgagtaccgcagagatcttttatttgtctcgcggctttctggccatccgctgccacatttctctggaacacggaatcatttccatagcaaatacctgtgaccccgaacagccatcgaaggggcaagctgaatacacaccaagcacatttaaaagaaaaaataattttttttttcagccaaaggtattagccacttctaggcaaccgggaagcagaaggatagaatggctgtgcatgcccgtgttccatattaacttcaaaggcaaggaagaaggaaaggaaagaggaaaaagagaaatagaaggaggaaaaaagaatttggagagaaaataaaaggggtaaccgggcatggtggctcacgcttgtaatcccagcactttgggaggcccaggtgggtgaatcacttgaggtcaggagttcgagaccagcctagccaacatggcaaaaaccccatctctactaaaaacaaaaaattaggccgggcatggtgactcacgcctgtaatcccagcactttgggaagctgaggcgggtggatcacgaggtcaggagaccaagaccatcctggcaaacatggtgaaaccctgtctgtactaaaaatacaaaaaattagccgggtgtg[134 bp omitted]tcaaaaaaaaaaaaaaaaattagcccgtgtggtggcggcgcctgttaatcccatctactcgggaggctgaggcacaaaaatctcttgaactcgggaggtggaggctgcagtgagctgagatcgtgccagtgcactcaagcctgggcgacagagcaagatcctgtctcaggaaaaaaaaaaaaaaaaaaaaaaaaaacggtgaggaatgagaaggaaagaggtttataaaaaacagagaaacaaaaaatttcagtaacagaagctgtcaagcatactagctgccttctttatgaaaatagagataaaaatgttcaattctgggcgggcacagtggctcctgcctgtaatacccgcactctgggagaccaaggcaggacgatcgtttgaggccaggagtttgagaccagtctggccaacaaagcgagacttcatctctacaaaaacataaataaaatcaggctgggcacagtggctcacacttgtaatcccagtactttgggaggctgaggcgggtggatcacttgaggccaggagtttgagaccagcctggccaacatggtgaaaccctgtctctactaaaaatacaaaaattagccaggcgtgctggcaggcgcctgtaatcccagctactcgggaggctgcggcaggagaatcgcttgaatccaggaggcagaggttgcagtgcactgagattgcaccactgctctccagcctgggtgacacagcaagattccatctcaatcaatcaatcaatcaatcaatcaatcaatcaaatcaactgggcatggcgatgcggacctatagtctcagctatctgggaggctgaggtgaaagaattgcttgagcctggggaggttgagattgtagtgagcggagattgggccattgtatgataggcaacagagcaagaccctgtctcaaaataataagaactcaaaaaagagaatgttcaatgtttagcttaattacgactaagctgtaacggtaacatagtgcgttgactggtctaggttctgtgcctgaatgttaccaacttttcaggattgatacaaagatttaccttacaacttggcaaggcaatctaacgaaagggacagtgggggctttgcgactagttcccatctttataaacgacattggcttcatctgcattattttaaggacatcactgtgtgaactgtaccgcttttattattatgactgttttaatagacacaggaggctgggcactgtggctcatgcccgtaatcccagactttgggaggctgaggtgggaggatcacctgagctgagggaggttgaggctgtagtgaacgacaattgtgccactgcactccattctaaacaacagagtgacaccctgtctcaaaacaaaacaaaacaaaaacaaattgagatgtaacttacagatgtcaaagtgcataattcttaattgtttacatatgtgtgactttttacgtgtgtgtgtgtgtgtgtgtgtgtgtgtgtgtgtgtgtgtgtgtgtgtgtgaatccttaccaccagcacctggatcaaggtatggaacatttccttctccccagaaggttctctcttgtccttttccagttaatacctctaccccatttttctgacttctaccaccacgtgtattttgcttactcttttattttaattttttagacaagtcacccaggctggagtgcaggggcgcgatcttggctcactgcaatcaccatctcctggttcaagcgattctcctgcctcagcctcccaagtagctgggactacaggtgcacaccaccatgcccagctaattttttgtatttttagtagagatggagtttcaccatgttggcaaggcttgtcttgaactcctgacctcaagtgatccacctgcctcaacctcccaaagtgctgggattacaggcgtcagccaccgcgcctggccttttctggcttctttagcatattatatctgtgaagttcattcatattgttgaatgcatcagttgttcattcttttaaaaaaaatctgagtggtatttcattataaaaatatatcactatttataggtttattcttttgttgacagacatttggtttgcttctaatattttttaaaaaaaattttttttgagacagagtcttgctctgtcttccaggctggagtgcagtggtgagatcttggctcactgcaacctctgcctcccagtttcaagtgattctcctgcttcagcctaccgagtagctgggattacaggcatccatcaccactcccgtctaatttttgtatttttagtagagacagggtttcaccatgttcgccatgttggtcttgaactcctgaccttgggtgatctgcctacctcggcctcccaaagtgttgggattacaggcatgagccactgtgcccggcccctcaaatttttaatagacacaattggcaagaaacgtcacgtgcacaagcaagtggtaagaaacttcaaaccattttctacaagcctttaaaaaattataacaggtgaaattatgtctaaggaccccaacttctttattcattaacaaatataagtttcaaaaattgttgtaatgatgtaaatggctttttgaatccagttgagtgttttcccatcaggcacttcaaatgataatgatgctctaatttgcatgcattgttggaggagtcatccagttgctggcttgatccctgctaaaagagcataccagctgcaaattgacagaagaatctgatacacgtgaagatggggacttggaggctttatctggagctgcagctaccaggagcccccttctggtcttctccaagaactgcaccttggcttcatggccttaccttggcacctggaacatggactccttcagtatcttccagtacctggatccacagtgacacaggatgttcgtggtggacagcgagtgtcagacgtagggatcaaagacacacctccagacctcactccatactggccaccccgacaggagccttggatgaggctgctcatggctgtagatgacacaccaaggaactagagcttttcagatgccacctggccactcctgttctcggccatagcagtgttacttggtactgtcaatgtccactgcattctgtcaaatgtgtgtcatttaaagaccacaagacataacaaaaattaattcgttaaaacttattgtattttattttttaaactgagatagggtctctctctgttgcccaggctagagtgcagtggtgcaatcacagctcactgcaacctcaaactcctgggatcaaacaatcttcccgcttcagcctcccaagtagctgggactacaggtacgtgtcaccacatcgcgttaattttcaaatttttaggagagatgaggtctcactatgttgctcaggctggcctcaaactcttgacctcaagcgatccccccgtgttggccttccaaaatgctggaattacaggtgtgagccaccatgcctggcctaattttgcttacacacacacacacacacacacaagaaaattgcaatttcaggagccatgacttatgacatcattgattcctgatggggcagctcaaaaaaaacaaaacaaaacaggaccataagatggcagtattgcataacaagctttactgcacggcacttagataggtttgcatgcggggaatgtcccttccagcaggactccttccagaggaactcctgggacagaggagagttagaggcagggcttaagtgtctaggtgatgtcattgagtagcaaggtggggagagtctgcatcatagaactctgaaaggcaacaataatttggggtttcttatggctgtaagatttttcttctctgtgattaataggtgttgttgggtgcaattttatggggtatgcaaagcaggtgggctctaaatgactaaacatatgcttatttgtgcaatatttatagcaatggattgtgtgagaatttgagcttggtgctggtgggctttgagctgagaggtccctgcctgcctgctgtaaagaaataaatgagatagggctgatagaaagacactgtctttggctcacttatacagcaagtgacaaccaatttagttcagacctttcttgcttctagacctgcaccatccactcttatccacttctcattcttcctggaagctgccacggaacatgcagacccccgtatccacttttgccagtagggacacccacttttgaaaagccacggacccctggcaacgcagctgcagacataccatttaactcaccctgcctggaaaaggaaagtaaatgttttcttcccaatttttgctagggaaatccaggcacatatatgtattcagtaactcaatgatataaatttcagggcttgtgtctgtgtgttattggaaaagcatttgaggctggctgtcatggttcatggctgcaatctcaacactttggaggctgaggcaggaggctcacttgaggccaggagttccagaccaggctggacaactctacctctacaaaaaaataaaataataagccccgcatggtggtgcacacctgtagttctagctactcaggaggctgaggtgggaggattgcttgagcccaggaattcaaggctacactgagctatgatcacaccactgggcctgggcaatggagtgagattctgtctctaaaaaaaaaatgcatttgagaattttagcaaatctaagtacatttggagtctgctaatattactgtatatgggattttggtgggaccatccctaaggatttaataataaaatgtccctttatattgttgagaattttaaataattctttaaagcagttatgttctgataaatatttaataactggctcttgagtggcatggggcgctgatttgcagtgtttgccaattcctgtggtgtaaatactcccactgtggctgatttcaaggtacagatgtgataccactgaatgtgaagctgagaagagatgcatgcaattggctctgactcatgcggttgatacatgccagctccagcacatcatgacttcaagctgtcccagatgtgccctgtctgaatttctgacctacaaaaaccacgagagatgatgagtgattatcaatgttttaagctgctaagtttttgagtaatttcttgcatgctggaatactatacagctgtgaaaaagaatgagaaagggctatatcgtagctatgttatctatgagggatatattatagatatgtcatctaattcttttttacagctgtatagtatcccagctgtgaaatagaatactatacagctgtgaaaaagaatgagaaaaagacaaatacctattatagcaatttgacctcacccaacggtgagagttcattatgtaataatatcggaccaatccagttcaatttttatgtaacaaagttgtgagttgtcttccagttgccatggaccccaggttgcaagctacataatcagaacatgtccagatgagctaaaaagtcaaccacaggtggaacctaagtgctcagacaaaggagcagaattgaattaagaaacagacgccacatggcaatgatccagtatccaatcagctcgagccctggcatcacaccatcgcaagagccaatcagataatgcctcattaccctgtgactataaaacctgccccaactcccagttcaaagagacagatttgagtgttttctcccattttcttgccaattggctcacattaaacctttctcactgcaaaaacatagtgctttgctggttgatgttcccttgcatataggcaaattgatccagtttggtttgtaacagttacatatgaggctttgactctgt[135 bp omitted]gcctcagcctcccaagtagctgggactacaggcacacgtcaccacgcccggctaatttttgcatttttagtagagacagggtttcaccatgttcgccaggctggtcttgaactcctgacctcatgatccacccaactcagcctcccaaagtgctgggataacaggcgcgagccaccacgcccggcctcaagtcagtctttcttccctgcttctgttcaattcattctgacctcctccacccacccaggcagtgaatgctgcttactgatggagagggggccagaaacagaaatgataaggataccagaactgtggagtcatgttggagggaggctggtcccaagagaaacctttggattgggtgcaatggctcacgcctgtaatcctagcactttgggaggccggggcaggtggatcgcttgaggtcagaagtttgagaccagcctggccaacatgatgaaacctcgtctctactaaaaatacaacaattagcttggcatggtgatgcatgcctgtaaccccagctacttgggaagctgagacaggagaattgcttgtacccaagaggtggaggttgcagtgagctgagatcgtaccattgcactctagcctgggtgacagagcaagactttgtctaaataaataaagcagtaaacaaaagaggggtgttgaaattcctcccatgagtaatccattggatatgtgaatatattttattaagtttttttttttttttttgagacagagtcttgctctgttgcccaggctggaatgcagtggctcgatctcggctcactgcagcctctgcctcccaggttcaagcaattttcctgcctcagcctcccgagtagttgggattacaggtacttgccaccatgcccaactaatttttttgtatttttggtaaagatggggtttcaccatgttggccaggctggtctcgaactccttacttgaactcccacctctgcctcccaaagtgctgggatgacaggtgtgagccaccacacccagctctatttttatttttaatatggcaaaatacgtataacactaaacttactaccttaaccatttttaagtgtatagtcataaaaattttaatttaaatactcacataggcttgtagctactatattggacagggtcaatttccaattttttccctgagttagtaagtcacctcgtccatgcgtaattcatcactcttttatcagctggacttttgagacttagaaacaatgactttttttttttttgctgctgtattacattgaggcgtataatatttgatcaaattatgttgttagggtctggcgcggtggctcatgcctgtaatcccaccactttgggaggccgaggtgggtggatcacctgaggtcaggagttcgaggctagcctggccaacatagtgaaaccccgtctctactaaacatacaaaaattagcctggtgtggtggttggcgcctgtaatcccagctactcgggaggctgaggcaggagaatcacttgaacctgggaggcagaggttgcagtgagccgtgatggcgccattgcactccagcctgggcaacagagcgagactctgtctcaaaaaataaaattaaaaataaaagaaaagaaaatagaataataaaataaaataaaataaaatatagttgttagaataagaagcacaactggcataaacaggtttgggaatacacagcttgcactcagtgagcacacagcgagcctggtatggaagtggatgcatgtacatttcagagcaaccctgcaaggtttccgtatgaaccagcgaccatgcatcctctgtgggggatagaccttgggttcatggatgagttggttaattgggtgtcttggaggttggctgagagctcccactgttcttgactcttaagacaagatggcacatgaggtgaaagcaggtgccccagtggaggatcctagaaccagccaagtagtgaggatccaaccgcccccttgcccagagaggcaccagtggaggacgcacaggtgactcacactgccagctgagtccccccttccccatttccagtgtaaacacctggattcttttacagagttacccttgagttcactttgcccttggctctgggggaagagagagtctcctggggtctgctggattaggagatgaatgttgccaaatgaatgcttctctttccgcagctgttgcctttatgcaatgccatttctatcttcagttctttctccattaaaatgtgagccatggcctggaatgaacttcatccctctgtgtggaggaagtgtcctcagctgcccagacaggctcagcttcgggtctgtgtaggaagaacccgtggaagggagtggggagtcgagctcaaagactaacagccaagactctgggagagtggtcagctcagagtcctcaggggagggggtgtggggatgagagtccacgttattatgttacctggggcaggtgggataaaggtaagagaaggtaagtggagggattttagtggcatacaacgactgcttttgttgcagagagcttattaggaagcagatgagaggaactgagcttgcaaaaggtttgtttagaggggacccacccttgggatggatactggtggaagggaaagggaagggaagggaaacaaacaggattgggggagacagagagacacagagagagagagagagcatgagaagtccagctgcccccagctctgtagctgggatggtccctgagttgtcctgagatttggggagaggggcccgagattttatgcctccatacagatgttggtggcccggggaagggaacaagaccctggatgaggacgtgccatttggcagatgctgacctgaaggggtggacagcagaggtctgcttccagcaacattcctagaggctggggcacacatctttcatcactgaaaagatctgggtagcacagcagcgtcctcatccttgctgaaacttgtctgggatagctatggacagattttctccaaggagatttacttttccacggtgagagggtgtgtgtgtatgtgattatgtgtctctatgaaggtgtgagtgcatatgtgtgtgtcatactctatgtaactgtgtacatgtgcatgcgtgtaattatgtgcacatgtgtgactgtgcgtctatatgaaggtgtatgtgagtgtatacgtgtgtgtcatactgtatgtaactgtgtatgtgtgcctgtgtgaattaagtgcacgtgtgattgtgcatctatatgaaggtgtatgtgagtgcatatgtgtaagtgtgtgccatactgtgtgtgtatgtaactgtgtctgtacgagtatgtgtgtgtgaatgtatggtgactgtatgtgcaaccgtgtgtcagcatgagggtgtgtgtgcatatctttgggagtatgtgtatgtgtctgtgtgtgtctgtatgagagtgtatatgagtgcatatgtgtgtcataatgtatgtgtgtatgtaactgtgtgtatgaggttgtgtgtgagtctgagcaagtgtgtgcatgtgtgtgcgagtgtatatatgtaattgggtatctgagggtgtgtgaggatgtggggtgtgcaagtgtgtgcaggtgtgaggacatgtgactgtatatgtgactgtatctgcatgagggtgtgtgtgcctgtgtgtatttgtctgcatgagggcacacaggagtgtgtgtgtgagattatgattatgtgtataattaggtgtctatcagtgcatacgtgtgtgagtgtatgtaactgtgtgtctgtatgagggtgtgtgagtgtgagaatgtgtgtgcatatgtgaatgggtgtgcgtatataattgtgtgtgtatgagggtgtgtgagtgagaatgtgtgtgcatatgtgagtgggtttgcgtatataattgtgtgtctgtatgagggtgtgtgagtgtgagaatgtgtgtgcatatgtgagtgggtgtgcgtatataattgtgtgtctgtatgaggctgtgtaaccatgtgtgtgcatatacgtgtgtgggaatgaatatatgtagtcatgtgtccatatgagggtgtgtgtgagcacgtgcgtgcatatgtgtgtgtaattgtgtgtctgtatgagggtgtgtgagagtgtgagcatgtgtgtgcatatgtatgtgtcttggaggttggctggcagcgcccacatatgtatgtgagtgtaggagtgtgggagtgtgtgtaattgtgtgtccgtacgaggctgtgtgaccacgcatgtccatatatgtgtgagtgtgggaatgcatatatataattgtgtctgtacgagggtgagagtgtgagcaagtgtgtgcatatgtatgtgaatgtgtgagtgtgggtgtgtaattgtgtgtctgtatgagggtgtgtgtgaccatgtgtgtccatatgtgtgtgtgcatgtaattgtgcgtatgagggcctgagcaatgtgactgtgtgactgtcacacattgtgtgtctgacagtgtacatgtgtacgaaatgggatgtctctataatgaggcacgtgtgtgactgcatatgtgcatgactgtggatgagtgtgcatgcatgtaatcatgtgtctgatagtacatgtgactgtgtgtgcgcatgtgtgtgtgtgcgtgcctgccagtttgtgtctgtatgaaagtatttgaattgtgtgaacaggtgtgattgtgggagcatgttatgagtgtgagtgtatgtgagtgtgcttgtgattgtgtgcccatgggaaggtctgtttgtgtgtgagtacctgtgcacgtgagagtgtctgagcgagcgagcgagcgtgtgtgcaacttgcataaatctgtctggcaccagcaaagtggctcaactgtctttagagacagaggtcccttccctcctgttggggacctcttgacctgctccctcccctccagcttcacccctgtccaaggaggctgctcctgatcccaggattctactggatggggggttggggaagggtgtcacctcctttcctttataggcatgaccaggcatggcccccaccacttatgcccacatcccacagggcaggatgtagtcacatggacacgccatgcagtcagggggcctgggaaacattctctctctttaggtgagagctctggggaagaagggctgaatggacattggtggacactggctgtcctggcacagctgcccaggtgctctgcagagtagatatttgtgaaacattaagaaggccctggtggccaggtgcggtggctacacctgtaatcccagcaccatggaaggttgaggcgggtggatcacctgaggccacgaggtggagaccagcctggccaacatggtgaaaacccatctctactaaaaatacagaaaattagtcgggagtggtggtgcatgcctgtaacctcagctacttgggaggctgaggcaggagaatcgcttgaacccgggaggcagaggttgcagtgagccaagatcacgctattgcactccagtctgggcaacaagagccaaactccgtctctctctctctctcacacacacacacaaaaggccctggagacaaaggaacactccttgtccttttctcctggcacagcacaagattctgttgctacatctttatttactgagcatctagtatgtgctgcacctggcactgttttgtcttttttgttttgagacaaggtcttgctctgtaggcctggctggagtgccatggtaccatcacagctcactgcagcctggaactcctgggctcaaacaatccccccacctcagcctccctactagctgtggttacacttgcgcaccaccacgcccggctaattttttaaatttttctgtagagacggggtcttactacattgcccaggctggttttgaactcctggcctcaagtgatgctacggacttggcctcccaaagtgctgggattccaggcacaagccactgtgcctggtagtggacattgttagcagtgactaaagcagagaacgagaagggggaggccgctgtaaacacatgaagacaggcagcgtaagagaaagtcacgagggcaggaataacatccaggcatacttcagatcccagctcaagaaaccactcccaggccaggcgcggtggctcacgcctgtcatctcagcactttgggaggccaaggcgggcggatcacaaggtcaggagtttgagaccagcctggccaacatggcgaaaccccgtctgtactaaaaatacaaaagattagccgggcgtggtggcgggcgcctgtaatcccagctactcgggaggctgaggcaggagaatcgcttgaacctgggaggcagacgttgcagtgaactgagatcgcaccattgcactccagcctgggtgacagagcaagactcccgtctcaaaaaacgaaagaaaagaaagaaaccactcccagactccctgcctgggcgggatcctttgatcaagccctcaacatgccttggggctctcttcacaatggtaagtttgcatttgtttgtgtgattctaggcctcctcttattttcttgaacaggcctcatctggctttgttcatctttatgtctccagcatccagcacaatccctgccattagggtcatggcttcataaaaacgtcacgaatgcaacgcagaagtgcatgcatgcatgaataaatgaatgatgcatgaaaagagcaatctccctgtcctggaagcagcttcccctaggggtgggggtggggtgcggaggcaggggcagccagtgatgtcacaagaggtggctgggatggaacgttctggaaggttgaatggggtagaaggcctgttgtggagggaaaccacccatcctcctgcctcccaccaccaccatcatcctggctggacggagagggtgacgggggctgggaaggggcagctcatgttcaggtttccaggaggggctacctgttgactgtctttgcaggaagaagaaaacacctgagtgaccagatgtcccagctccaggtgccttgccagatggccagaaccacacctcttgaagagtgacaggtgccagtggtatgggagaagggcatgcgttttcttttcttttttttttgagacagggtctcactcttttgcccaggctatagtgcagtggcacgatctcagctcactgcaacctctgcctcccaggctcaagtgatactcccacctcaacctcccaagtagctgagattacaggcgcctgccaccatgtccagctaattttttttttttttttgagacagagtcttgctctgttgcccaggcgcaatctcggctcactgcaagcttcgcctcccaggttcacaccattctcctgcctcagcctcctgagtagctgggactacaggtgcctgccaccatgcccggctaattttttgtattttttagtagagatggggtttcacc[135 bp omitted]taccagccaggctggtcttgaacttctgacctcaggtgatccacccgcctcgacctctcaaagtgctgggattataggcacgcgccaccatgcccagctaatttttgtatttttagtagagatggggtttcaccatgccagccaggctggtctcgaactcctggcctcaagcgatccacccgactcagcctcccaaagtgctgggattacaggtgtgagtcaccacatctgaaccctacatggccttttaaaattgtgaaacatataatgcatataaaataacacaaagcatatctgtacgatttaatgaataacgataaatatctgtgtgcccttttcacttcgtgaaatcgaatattactagtaacttacaagtcctctgtagagaactcctgagctcaagtgatccacctgccacggcctcccaaagtgctgggatcacaggtgtgagcctccgcacccggccgatcgtgtgatttttaacgtgcagttccctgatgaccaaagctactgagcatcttgtccaggatttgtagccctttccaggctccttttttgtgaactgcctgtttacatttttcatcataaaacactgggttgtttacatttgtcttttaaatccagagttcttttcatactccggatactaattttatttgcccattttgcattgccataaagtaatacctgaagatgggcaatttataaagaaaagaggggcctggtgtggtggctcacacctgcaaatcccagcactttgggaggccgaggtggcggggttggggggggggggggggcttgcttgaggccaggagttcaagaccggcctgggcaatatagcgaggcccccagctctacaaaaataaaaataaaaataaattagccaggcgtagtggcatgcttctgtagtcccagctatctgaggggaagagagttccaggcagagggcacagcccgtacgaaggccccaaggaaggactgcacctggtgagttggaagaacagtgaggaggcccacgtggctgcagcagagtgaggagggggagggaggaaggaggagagcacagggaggtgcagggccttgtggaccgtggggagaacttgcgcttttacctggagggaggtgggagccatggagggctgcaggcagaggagagacagggttgggccagcatttcacttttttatttttatttatttatttatgtatttatgtatttatttatttatttatttttgagatggagtttcactcttatctcccaggctggggtgcagggcgagatctctgctcactgcaacctctgcctcttgggttcaagcaattctcccacctcaacctcctgagtagctgggattacaggtgcctgccgccgtgcctggctaatttttgtgtttttagtagagacagggtttcaccgtgtgaaccatggccaggctggtctcgaactcctgacctcaggtgatccacccgcctcggcctcccaaagcactgggattacaggcatgagccaccatgcttggcattcatttttatttgtaaacacttttatcgtggaaagtttcaaacacaaaagtagagctgatcataacataagcccccagctacctatcactcggctccaacttaaagtcagccttggtcatttctgtgtcaccccactcctcgtgggtagttttaaagcaagcaccagacagtgtgttctttcatgcatgaatcctttggcaacaaggattcctttctctaacttcaccccaaagcaattatcatactttaaggaagtaaacatcccctcttcatttcttcatgtcgtctgagacacagtcagtggtggagttcttggcggcctcgtgcacatcttgtttgaattgagatctagcagaacccacaatgcgcctgggtgatgggcctctcacgtgaccaggacctctcaggctcctgggaggaagcttaggtccaggcaggcggagagagtggatcccattttgaaggctgagctgatggaattagctaatgagtcaatgtgctaggaagagagagggagagagagaggggaagggggaagggggagggagggagggaaagaggaaggaggaaaaggaaggaaggggagggagggagggaggaaggaaggaaagaagggagggagggaaggaaagagggaagagagagggaggaaggaaggaaggaaggggaggaagaaagaaaggaagggaagggaagaaggaagaaagaaaaggcagggacggagggaggaaggaagagaggggaagaacgaagggaggaaagaaggaagggagggagagaggaagggtaggagaatgggaaaaaggaaggaaggggagggaagaaggaagtagaaaggagggaagaaagggaagaagcaaagggaggaaggagggagggaaggaagcaagtcaaaggtgaattaaggatgactttgaggttctgggccagatccagctgctccagaggggccttgggcttcctcctcatttcttcttgggccgcacactccgtgcatgtttttcatgcatatctgtagcttggtctggatctgctgttttgggctgctcgctttgtcctgctgattgatctactttgtgtgtgtaaactccgtaggctcattcaagttcactttacttatttttaaaattaaacttatttttttttttttgagatacagttttgctctgtcacccaggctggagtccaatggtgctatcttggctcactacaaccttcacctcccaggttcaagggattctcctgactcgacctcccaagtagttggaactacaggtgtctgccaccatgcctggctaattttttttgtatttttaatagagacagggtttcaccatgttggc[142 bp omitted]acaaaatcagtttttgctggtgtaagaatcacgtgcatgttacagggcttcattcaccagagggtttactcaagttttcacctgctgtgttcctgcactcactgatggaaacttttagagttcataaaacattactgcaaatctagaatccagaacaactgcttgattcttgtgtcaagcacgctctttatcatgaacaaaatcgtacaattttcctccctgaaagccactagaaaaatcagtttcaataaatgttgaccaacaatttggcctccacttcccccaggggacaaagttgacaatatctggagacatttttgattggaa[132 bp omitted]gaaactctgtctctactaaaaatacaaaattagccaggcataggctgggt[134 bp omitted]gcgtggtggtgggcacctgtggtcccagctactcaggaggctgaggcaggagaatggcgtgaacccagaaggtggagcttgcagtgagccgagatcgagccactgcactccagcctgggcgacagagcaagactccgtctcaaaaaaaaaaaaaaaggaattaacacactgagaattaaacaacctgaaggagtggtggtacaaacaccactccaaagccctcaaacagtagagtccaattaatgactatgcaaaaacccagggtagccccggaatcctgtccgctactgatgggttaaagaccatgtgatctcggccaggcgcaatggcttacgcctgtaatgccagcactttgagaggctgaggcgggcggatcacttgagcttgggagttcgaaaccaacctggctaatgtggtgaacccttgtttctactaaaagaatatttttaaaaattagctgggtacggtggcctgtaatccctgctactccggaggctgaggcacgagaattgcttgaacctgggaggtggaggctgcagtgagccgagattgtgtcactgcactccagcctaggcgacaaaaccaaaccaaaccccatgtgatcttaagtctgattactgataagtgttttcgaaagaggtggcattgatttttaccacgatgaatgagagcacctgttttcccacattttcataatagacaatattgtcagcttttttgatcttacttaacctgaaaggtgaaaactgcatcatattttctgttgtatttctcataggactgagtttgagcatgtttacttctttttaaaagtcatttttcagtttcagataattatctattcatgtcctttgcccgctttcccattgggttttggtctttttctgattaattcctcagggttctttacatatgagggaaatcaagcttttatactttggatgtattgtccacatctttccccaatttgttgttgatctcttgatttttgtttgtggtattcttggccatgtggaaaatttaaaaattttatgtagcaagacttatcctgtttctcctttaggccctttgagttttcatgttaatattacctttaagagaagataaatgtgtggtcccatgagagtttctttcccctgggaggcttcaaaatattttctcacccacagaattgtgtatagacccagactttatattctaacaatttaagagactcttctgtaaactcacagattgaataccctctgggttttacaaatgctctattatctggcatgccggccactctcctctcctcccaggcccaggacaggcatgaccaatggatcctaggattctaggcagacatgaccagtggatggaagagttggcctcatccctacagcccctttgccaatcctgttaaactccctgcttttttgctttgcagtgctgtggagcatggtttctgcacacctggaatgactggaaccccaaagactcaagaaggagctaaagatcttgaagtagacatgaataaaacagaaggtatattgcactaaagagtacgtgggagagagagtggcacattgattccacaaaggctctttgcagaggagtctggatctagaaagatgtagccattccttgcctgaccctgctgaccccgaccccccacccttttgttttgagacagggtcttgctctgtcacccaggctggagtgcagtggtgcagtcatagctcactgcagccttgaccttccaggctcaagtgatcctcctgcctcagccctccaagtagctgggactacaggtgcacaccaccatgcccagctctgtattttttttgtagagacagggtttcgctatgttccccaggctggtcttgaactcctgggctctagcaatcctcccaccttggcctcccaaagtgctggaattacaggtgtgggccaccgtgcccagcctagggcctattttctattcttgataggttgttgaggtagcagggcaagttgttcacataattcagagctctgctctactggtgatgtgacactgggcaagtcacttgctctttggaggcctcatttgcatatctgaatgatgggggcattgataacagcacctccctgtcaggttggtgagcccgagtggataaagtacccaggaatcatccatgtagatagggtgcggatatgatcatagtgatttattaacattaggctataatcattttactgtcagagctaaagtcaagggacatggtgacatcatagacagctctgataccagtgggttgggggaggtccccaaacgccggtgggacctcgaacccagccattatccaggctcttgacaccatcgagagtgaattcaagaaacaagtcagaaaatagtgaaagtgggccggg[133 bp omitted]ggtgtggtggcgggtgcctatagtcccagctattcaggaggctgaggcaggagaatggcgtgaacccggga[137 bp omitted]tacacattcaaggagagggagtgcaggcgtgcttgaaagatagcatcacacacaaaggagtttggggatgctacctttatgggtccaaagggtggaatattcatctaaatccctagaaaactggccgggcacagttcacatctgtagtttcagcactttgggaagctgaggcgggcagattgcttgaggccaggaattcaagaccagcctggccaacatgacaaaaccctgtctctcttaaaactacaaaaattagccaggtgtggtggcacatgcctggattatagtgagtctcaacttattgcaacctctgcctcccaggctcaagcgattctcatgcctcggccacccaaacagctggcattacagtcatgcaccaccgtgcctggctaattttttttttttaacaaagcgccccaaagtgggtgtctgaaacagcagaaatgtattgtctcacaattctggaggccagattactgagatgaaggtgtgggtagtgaggttgcagtgagccaagatcacaccactgcattccagcctgggcaacagagtgagactctgtctcaaaaaaacaaaaacaaaaacaaaaacaaaaacaaacaccagtcattggatttagggatcaccctaaatccaagatgatgccatgatgtcatctcaagatccttcactaaatccacctacaaaaaccctgtttccaaatacggtcacagtctgaaattctgggtggacatgaattttggaggttcaccatgtaacccactacagtcattaaaatatcccacaagtgtccaggtgacacctccatgtttttgtccaatttaaagcatctccactcccccctgcttcaggctggggtcaggaaggcatgataaggtgctctttgagttcctagatgctcttctcctcatcacccccatctccccaggtggtttctttgtgagctggtgctgactcccagagctgattagctcgggaaagtggggttgaagggggcctgtatgaactaggcttcccttgttgtaagttgttatgagattaattgtgcatctccaattcctttgtggaagtcctaacccccaggtgctcagaatgtaaccttgtttgggaataggatcattgaagtaatttggtttttttgttgttgtttggttttgttgttgtttttttgttagttagtttgtttgtttggtttttgagatggagtctcgctctgttgcccaggctggagtgcagtggtgcgatcttggctcactgcaatctccacctcccgggttcaagcgattctcctgcctcagcctccagagtagctgggacaacaggcgcgtgccaccacgcctggctaatttttgtatttttagtagatacagggtttcgccatgttagcgaggatggtctcgaacttctgatttgaagtgatccacctgcctcggcctcccaaagtgctggaattacaggcacaagccactgcacccagcctactgaagtaattagttaaaatgacgtcatgaggttaggtcccaatccaatgtgaccagtgtctttataaaaggaggaaatagagacgaacctgcacacacggagaatgtcatgtgaggatcgaagcagagtttgcagtgatgcacctacaagccaaggaatgtcaaggattgccggcaaccgcagctaggagaaagtcattggtcagattctctcccacagcctcagaaggaaccagtgctgcctgcaccttgatctcagacttgtggcctccagaattgtgagacaatacatttctgttgtttcagacacccggtctggggcactttgttattgcagtcctagctaattaatatatcagtcataccagtgtctgttttttttgttgtttttttctttttctttttttttctttgagacagagtctcactctgtcacccaggctggagtgcagtggcacaatcttggctcactgcaacctctgcctcccgggttcaagtgattctcctgcctcagcctcctgagtagctggaattacaggtgccctccaaccacgcctgactaaattttgtatttttaatagagacgaggtttcactatgttggccaggctggtctcgaactcctgacctcaagtgatctgccggcgtcggcctcccaaaagtgttgggattacaggcatgaaccagcctgctgtctgttgatgactatctgaacatacatctccagtccttgggtcctactactggcaccaagccaagagcctttagaagcccatctatgaggcccatgtctagtcaaggggaaaaagtagcatcccggccgggcgcggtggctcatgcctgtaatcccagcactttgggaagccgaggcaggcggatcacaaggtgaggagatcgagaccatcttagccaacatggtgaaactcatctctactaaaaatacaaaaattagctgggtgtggtggtgcccacctgtaatccccgctacttgagaggctgaggcaggggaatcacatgatcccaggaggtggaggttgcggtgagctcgcatgatcccaggaggcggaggctgcagtgaactgagattgtgccactgcactccagcctggagatagagcaagactccatctcaaaaaaaaaaaaaaaaagtagcatcccatcataggtggatgtgcaatttccttccaacacagctgcctactctaccattgccatctaccacctccccagtagaccaggttcagttgaacaaacgcaaggttacacacccaattctccaagagggtctcttggactttctctcacttgcccgttactgggtggtagtgagaaacacacaacaaaccaacaactgtctccagaggaaaccctgttctcttctttctcagtgtcaacccttactcatccccaaaagaagtgatagatacaggaccccaaaactggttttgaattggtccctttgctagttccatttggctgatctgggtgatgtcgctgtgacaggcaaccccctcaacaaccccctcaacaacctcaatggcttaacacaacacaagtgtgtttcttactcatgttgtgtgtctggcattgggggagaggggctacttcttcacatttgctccaccatttttgtgacaggacaatggacgatggggaattatgcaccgggtcttaaatcttctccccatgaacgacacacataactcacttcttatgtttcattggccaaagcatacatagtccactgcatgtacattttacctttaaaaaaatctccgtaaataatattaaatatgtgactcttgttaatgatttacatgcaagggtgtttaagggtaaatggatgaatagctttggctcacttggaaatgcatcaaaaaatcagatggagccaggcgcggtggctcatgcctgtaatcccggcactttgggaggccgaggcaggtggatcacttgacgtcaggagttcgagaccagcctgggctacatggtgaaaccccatctctactaaaaatacaaaaattagccagatgtggtggcgggtgcctgtaatcccagctactcggcaggttgaggcagaagaatcgcttgaacctgggaggtgtaggtcggggtgagccaagatcacgccactgcactccagcctgggcaaaagagtgagactccgtctcaaaaaataataataggccaggcgcggtggctcatgcctgtaatcccagcactttgggaggccaaggcgggcggatcacctgaagtcgggagttcgagaccagcctgaccaacatggagaaactccatctctactaaaaatataaaattagcgaggcgtggtggtgcatgcctgtaatcccagctactcgggaggctgaggcaggaaaaacgcttgaacccgggaggcggaggttgcagtgagccaagatcgtgccattgtactccaacctgggcaagaaaagcaaagctccgtctcaaaaacaaaaacaaaacaaaacaaaataataataaaaaaaataagatggggccaggtgcggtggctcatgcctgtaatcccagcactttgagaaactaagggaggaggattgtttgagcccaggagtttgagatcagcctcggaaacacagtagaaccccatctctacaaaacattaaaaaataaattagctaggcatggtggtgtttgcctgtagttccagttatttgggaggctgaggtgggaggatggcttgagcctaggaggtcaaggttgcagtgagctgtgattgtgccagtgcactccagcctgctgacagagcaagaccgtgtctccagaaaaaaagaaagaaagaaaaaaaaaatggacataacaaagacagcaggatagatgtgtgataaaatatggtaaaacgctagcagttgtagaatctaggtgttggataagaaagtatttggtatacaatccttttgactattaaaatttggcggggcggggaatgaaaaaataaataaagagaaaggaagcttgtcttgccagtgttgaccacataacttcaccctagaaggggattaattcaactctcagcaccttaggtccaaaaagacaccaaccgccccccgtccaaagttattaaataaataaaaacatttgccacccaactctggtgactatttgcagttactcccaggctgtggaccacctgtcgagatggagaagtccttctgaggctatccaaacacggaccaggccatgagaccccgatgaccatccctgaattttttcgagagtcagtcaaccgatttggaacttatccagccctcgcatccaagaatggcaaaaagtgggaaattctgaatttcaaccagtactatgaggcttgtcggaaggctgcaaaatccttgatcaaggtaagattcattcattcattctcctttgttcaaccattcattctgaataggtaacagacatacatacatgtggtacaaaattcacaaggcaccaaaagatacaaaggttaattggcgaaaatttccctctgattcatgagcctcagccactcagttcctctctgtggaagcggtcaccattgtcagttttttgtgtgtccttttgggaaataaattatgcataaatataaaatgaaatttttatatatgcaaattttttacacacataatagcctactacacccatggttctgcatcttgcatttgtccctaacatactatctctatgtttttgttagttgctgctgcataacaaattatcccaaaatatagtgacttgaaatgacaaacatttatcatctcacagtttctgtggattgagaatttaggagctactttgaaattgggttcttctggctccaggtctctcatgaggttgcagccaagctatcagctggggctatctcatctgaaggctcaactggggctggaggcttcacttccaagcttacttacctagatgactggttgttggcaggaagtctcagctcctcattccatggccttctccacagaattgcttgagtgtcttcacggcatggttgccagtcacccctagaatgaatgaagcaaaagaaagagggaacaaggctggggtcagtggctcatgtctgtaatcctagtgctttgggacatcgaggcaggaggatcactgagcccaggagttcaagaccagcctgggtaacatagtgagaccccagtctcaatgaaaaatttaaaaagtagccagatgcagtggcacatgcctgtagtcccagctatcaggaggctgaggtgggaggatcacttgagcctcggaggtcgaggctgcaatgacctgtgattgcaccattgcactctagctgggcaacagagtgagatggtgtcataaagaaaaaaaaaaaaaaagagaaccatgtgcttgggctgggtttcttcttgggggccccaccttcatactatgttgctgtggctagttcatctctcctgaaagatggtctcctttagccatgttcttagttccgtggagttaaaggtccccctcctcccgtaaatcttggacacctgactgagcacggtggctcatgcctgtaatcccagcactttgggaggccaaggtgggcggatcaaggtcaagaggtcaagagtttgagaccagcctggcccacatggtgaaaccccatctacactaaaaatacaaaaattagccaggtgtggtggtgcacacctgtaatcccagctactcaggaagctgaggcaggagaatcgcttgaacccgggaggcagaggttgcagtgagccgagattgtgccactgcactccagcctgggtgaaactccatctcaaaaaacaaacaaacaaacaaaacttggagaccgaagtagaaacaaaaccaaaaataaaaacaaacaaaactacttggagacccaagtagaaattagtcggtgtaactaggcattaataaaaacacactctgtccacaataaagccagccttttggttactgaaatacttggcatctcattctgaaggaccagcaggcaaatgccttccaaatggttccttttcccccaagaacagcagatcattgccagccgtgatcccgtatgactaaaagagccaacaacgttggttggcagtacccagaacaaagagggagttttcccctaaggatgctcacttttgtttctgagtttcctggttcattctcacccacattcagaacaagtctgtacctttacatgtgcaacttttttttttttttttttttttagacagagtctcactctgttgcccaggctggagtgcagtggcacgatcttggctcactgcagcctcagcctccaggttcaagcaattctcctgcctcagcttcccaagtagctgggactacaggcaggtgctgccacgcccggctaattttttgtatatttagtagagacggggtttcatcttgtgggccaggctggtctcgaacttctgacctgaagagatccacgtgccttggcctcccaaagtg[210 bp omitted]cagctactcgggagggtgaggcgggaggattgctggagcctgggaagttgaagctgcagtgagctatgatcacccactgcactccagcctgggtgacagagcgagacaaaaaataataataataaaataaaataaaataaaataaattcacacctttcaagatagctattctttaaaaaatagcaaaacacaacacgtgttggggaggatatggagaagctggaacccttgtgcagtgctggtggaaatgtaaaatggtgccgccactgtggaaaagtctggcgatttctaaaaaaagaaaaaatgtaaacagagaattgccatatgattcagcagtctcactcctggatatttaacaaaaaaaaaaaaaaaaaaggaaagccagagacatgaagagttatttgtagactcagggtcatagcggcgttattcacaagagacagagggtggaagcagcccgtgtgtccatcaatggaagaatggataaacacgatgtggtccgcccatacaagggaatatgattcagccacaaaaaggaaggaaattctgacacatgctacaacatggatgaatcttgaggacatcatactcggtgaaataagccagacacaaaagggcaaatcccgtatggtttctttcctaggaggtccctagagtcgttagactcatagagacagaaagtagaatgggaggtgccaggggctggggaaggggatagagagtgagtgttttatacagagagtttcagtttagaaagaggagaaagttctagagatgaacagtggtgacggttgtacaaccatgtggatgtgtttaatgccactaaactacactcttaaaaatggtcaaaacgggctgcgtgtggtggattacaggcgtgagcactttgggaggctgaggcgggaggattgcttgaggtcaggggttcgagaccagcctggccaacatggtgaaacgctgactctactaaaaaaacaaaaattagccaggcgtggtggcgcgtgtctgtaattccagctacttcggaggctgaggcaggagaatcgcttgaacccaggagacggaggttgcagtgagccgagatcgcactgctggactccagccttggcaacagagtgagactctgtctcaaaaaaaaaaaaaaaagaaaatggtaaaatccatgttatagatattttaccacaataaatgaaacaaaacataaaaataaaaataataaatggtgtgttatgtagagggaggtaaacaaacctcccgtagtcataaaaattaaaaatattacacctcagattttaggctcaatgctgtctcccaccccgtgtggctacttttgttttgttttgaaacagggtctcaatctgttgcccaggatggagtgcagtggtgcaatcatagctcactgcagcctcgaactctagggctcaagtgatcctcctgcctcagctacccaagtagccgggacgacaagtgtgtaccaccatgcccggcgaacttttccactttttttgtaaagacaggggtctcactgtgttgcccaggctggtctcgaacttctggcctcaagcaattctcccacctcaacctcccaaagtgctaggattacaggtgtgagccactgcgcctggcctccatgtgactacctttgattctgtcgtcacatatcctaatgatataacatctctgtgtttatgttttgtttttctgtttgctttttccttcccagctgggtttggagcgtttccacggagttggtatcctggggtttaactctgcagagtggtttatcactgctgttggtgccatcctagccgggtaaggtcattggcttggttcatggtgagggttaaggagccgctaccctgggcctgggacccctgggcttgtccagtgtgagatgcaaacaggaattttggatgaacgccctagttagcaggcaggatagatgcacgaacaaatcattctgatcacaggtcatacgcaataacacccattagactagcagtctcagacctctcgattttcttcagctgaagaactttttgcagacaaaataataattgtagatagcatttagaggtttctgattatgtgcagaagcattgtgctccacgtgtatgatcctgtaaaacctcacgacagcaatgtgaagtgggtcctatcatcccctatctacagatgaggaaactgaggctcacacagccagtgggcagccttgaagtcttgggctcatgcgatcctcccaactcggcctccagggtaactgggactatgagcacacaccaccacacccagctaattttttttttttttttttttttgagacggagtctcgctctgtcgcccaggccggactgcggactgcagtggcgcaatctcggctcactgcaagctccgcttcccgggttcacgccattctcctgcctc[168 bp omitted]gatggtttcttgctatgttgcccaggctgtaatcgtgaaaaaaacaaaagtaaaaataaaatactgatttcttcttgagcttgtaattctacctttgggagttttacttaaagaaacaaaaccaaaacatgaatatattttggcttatgcacaaagatacttcttggaagtgttattagtgatggcaaaaagtcggggacaacctaagtgtcccacagctgtggattaaaccatgagatgccttctggatgggattctcggtaatattttgaaatgatggctctgaagagcacattttaagcatttttgatgtcagaggtgacaaagcaggtatcaaaatctttatacactgtatggttacaactatgcttaaaatttaaatatcaggccgggtgtggtggctcacgcctgtaatcccagcactgtgggaggccaaggcaggcggatcacaaggtcaggagatccagaccatcctggctaacatgctgaaaccccatctctactaaaaataccaaaaaaatcagccaggcgtggtggcaggtgcctgttagtcccagctacgcgggaggc[144 bp omitted]atataccaattattgctggtcactcttacctatatgatatcattgactgctcatggtagccctttgaggtaggtgccatcatgatcccaagtaataatgatggtgacgataatctgggaccaatagaggttaagtgtcttccccagaatcatgctgtggttggataaagaccctgagatctgaactcgtttgttcgactcaagattaataataacaacagcaacgacagcagcagcagcagccacggccatgacaaaattgagcggctgggcacagtgactcatgcctgtaatctcagcactttgggaggctgagatgggaagactgccttagcccaagagttcaagaccagcctggacaacatcgcaagattctgtctctaaaaaataaaataaaagtgtttttaaaattagccaggcatggtggtgtgtgcctgtagtcccaactacttgggaggcagaggtgggaggatggcttcagcccaagaagttgagactgcagtgaattatgatcataccactgcactccagcctgggcaacagagtgagaccctgtctggaaaataaaagtaaagaaaagaaaagaaaagaaaaggaaaagaaaaaagaaaagaaggaaaagaaaaaagaaaagaaaagaaggaaggaaggaaaagaaaagagaaaagagagagaaaaaaattgagggtggtgactagaaataaatattaacattagttatatctcatcatcgagactaacaccaccctaatatgttatattctattttccaaatttttatgagcatatactacccctgtcttacagtgagttgaaatatatatatattttgaggccgggtgcagtggctcatgcctgtaattccaacactttgggagtggaacacctgaggtcgggagtttgagaccagcctgaccagcatgtagaaactctatctctactaaaaaaaaccccaaaaaattagccaggcgtagtggcacatgcctgtaatcccagctacttggagggctgaggcaggagaatcacttgaacccgggacgcagaggttgcagtgagccgagatcatgccattgcaatccagcttgggcaacaagagcaaaactccgtctcaaaaagagagagagagagagagagagagagagagaaaattattattatatatataaaatatataatacatataataaataatatataatacatataataatatataatatattatattatctatatagagagaggtggagtctcactctgttgcccaggctgcagtgcagtggtgtgatcttggctcactgcaacatctgcctcccgggttcaagtgattctcctgcctcagcctcccaagtagctgggactacaggcgtgcgccaccatggctggctaaattttgtatttttggtaaagatggggtttctccatgttggccaggctggtctcaaactcctgacctcaggtaatccacctgcctcagcctcccaaagtgctgggattacaggtgtgagccactgtgcccagcccagaataaattttaatgaagagatctgtccccattttaggactgaatggtaagacagtgtcatgcagtgattgggctctggtgccacatcagacccaaattcaaatcttgggttgtctgctattttgtattctgtatgaatgagcaggaaagcacacatctccatgcctcacagggctgttataaagattcaataagaggatgcttcataaacccttagcacagtgcttagcaaatagtatgtgcttaagaatggtgatgagagtaaccatctcaaataattataatgtgcctcattccctgccatattaaaagcacaacaactagatcaacagagcagagagcccagaaatagctccatgcatacatggtcactggcttccaacaaaggcagcagagtagttcagtggtgctggaccaactggatatttgtatggaaaaataaatcagccctgatccctacctcacatcatatgcaaaaattaaattgagatggattacagactaaatcatgcaagttaaattctaaagcttctagaaaaagaaaagcacggaatggtttcacaacctgggggtagtcaaagatttcttagacaggacacagagagcaaaaagcataagagaaaaagttgccaaataggactttattagcattaaaaacttctgcttattaaaagacaccaacaagatgaacagttgtcgaacatggtggctcacgcctggaatcccagcactttgggaggcaggggtgggtgggtcactggagtccaggagtttgagaccagcctgggcaacatggtgaaacaccttctctacaaaaaatacaaaaattagccaggtgtggtggtgcatacctgtaatcccagctactcaggaggctgaggcatgagaattgcttgaatccaggaggttgaggttgcagtgagctgagattgcaccactgcaggccagcctgggtgaccgagctagaccctgtctcaaaaaaaaaaaaaaaaaaatggtgaacaggcaaactgcatacttggagaaaatattcttaaaactcgaatttctaacaaaggactggtatctaagatagataaagaaattctgtaactcagtaataaaaaggcaaaaaaaaaaaaaattgaaaggggcaaaagatttcaacagaaatgccacaaaggaaagtagccaaaaggcacatgtaaaggtgctcaatgtcattatccattgggaaatgcaaattaaaagcaaaagaggatgcaccctgcaagcacaaaaggctgtgaatgatgggaacagaggctgagtcaggagttcagatcctaggtctaacacctacttgctgtgtaatcttgagtgacttcactgctgggcccctgtttttctcatctataaaatgcggtgttctaagtgttccatgacctgttgtcatagtgacatcataggagctgtcacttatcatcattgtcatttttgttgtcttcatcattgttaagttggggaggaagggaagctggtgctgtggctgcaaacttaagaacttgcctgcaaacctttcctctcttttgaccttccagaccattctgcctttaaggtgtgtgtggatgcacacacgaatttgttttcttttcccaggggtctttgtgttggtatttatgccaccaactctgccgaggtttgtcaatatgtcatcactcatgccaaagtgaacatcttgctggttgagaatgatcaacagttacagaaaatcctttcggtaaacccctacccagcactgcctgccaaagtcacccaggggtacctcagggctctgggcaggtgttctttttttcccaggtaaattctaatgataagatagggccatgcatctgttcagcgagtcctccatgacctcattagtatatgtggtgaagctatttttggagaagcagactgaaatagaggagtttgatttccaattcatattaacttagtttaatactcagcctccatttttttttttttttcgagacagggtctcactctgtccccaggctggagtgcaatgtcgtgattgtagctcactgtagccttgaactcctggtctcaactgatccttctgcctcagtcctccaagtagctgggactacgagcgtgtaccaccatgtcaggctaactttttttttttccgagacagagtctcgctctgtcgcccaagctggagtgcagtgggctgaactcggctcactgcaagctctgcctcctgggttcatgccattctcctgcctcagcctcccaagtagctgggactacaagtgcccaccatcacgcctggctaatttttttgtatgttttagtagaaacggggtttcacc[140 bp omitted]tcatgcttgtaatccgggcactttgggaggccaaggcaggcagaacacctgaggtcaggagtttgagaccagtgtggccaacatggtgaaactccatctctaccaaaaaatacaaaatttagccgggtgtggtggcatgcacctgtagtcccagctactggggaggctgaggctgaggtggcaggatcgcttgaacctgggaggtggaggttgcagtgagccaagactgagccactgcactccagcctgggtgacagagagagaccctgtctcaaaacaaacaaacaaacaaaaaccattttttttttgtagagacagagtcttgctatgttgcccaggctgctgttgaacttctggcctcaattgatcttcctgcctcagcctcccaaagtgctgggattataggcatgagcccccatgcccaaccttaagcccccacttaagtaaaagtattaatatatttatgtattattttatatacatcccactgctaattattttttcttttagaagtgtgatgatttcaagcccatgctactatataattttcttcatttcttgtcattgtcttcatttctagatgcttttgttgttctcttctatttcttgcctaagttctatcccttcctgtttcatttttttctagtgtcctgctgtctcttccctgagtgcttgtatgtttgctttgtgttcttcctttctagctgtgtttgcttcatta[141 bp omitted]ttcacgtcattctcctgcctcagcctcccgagtagctgggactacaggtgcctgccacca[137 bp omitted]acctggccttggttacaattttcttttgcattgtgttgaaattatccagtgagttttatttgtgtacagtgaaatttagctgctgtcttacgtttttttttttttttcattgtagtgtctttgtatggctattgtcgaaactttaaatttcctacatgtttgaatgagctgcagtttgctgtatcagcttttggcaggagggtcctggagaggaggggagtccctgggaggggtgagcctagatggctaggttcatttcagctcaaggaccactgtgactgtttcttgaatacatgatttcatgactctgagtcactcatttcttcactttttcacatctctggagtcgagatgtgtcttttcattgatggcattctctgatcactactggccatatgttttctcacattttattctctccgaaatttgggtacagtttccagattcaatgaaatcctagctagactcagtgaaatacaacactttctcctgcctggcttcctttgactcctaattcctgacttggttcaggaaggacagacctccacctctggcctagagcttttaaaaattcttttcttttttctttttcttttcttttctttttttgtttgtttttttctttttttgagactgtctcactttgtcgtccagtctggagagcagtggcgccatcttggctcactgcaacctccacctcccaggttcaagtgattctcatgcttcagtctcccaagtagctgggactacaggtgcacaccaccacaccgggctaatttttgcattttttgtcaagactggatttcgccatgttagccagactgctcttgaactcctggcctcaagtgatccaatggccttggcctcccaaagtgctgggattacaggcatgaaccactgctcacaaaattactttcttaagtgatgcatcggtggttcccaaaactcatgtcatacctgtttgtcctcttcctagcagaacacactatggggtgggtgctggtgggtgggtggggtccttcttccagctgggaatgctggcttaatttgagttttccataactggaaaatgccacatacacaaccttcccctctacacccacctggctgctgtggatttctgtcctggttctagcaggtccagcattaagtgaataaagcaatatctgaattatttctgactcctagtttcattgaaggtgaagtctgtggaggatttattgttccagttgctaggtctagaagattcaaaaccaggttcctgacatgcttctcccaaattggatgcccagctccacttggagatctttatttgggggagtaatcacagatcctcctctgcttataatcctctaattctctagcggttttctgttggagttaaataaactccaaactcctcatctttgcctccaaggctccgctgatctgggcctcaccattctttcatgccccctcccctatcatactctcttgggtccccactctggccatcctggactttttgtatccctcagacatcccaagctgttgcctgccccaggctccttgaatgtctgtttcttcttctctctggaaaactcctgtccagctgctatacgggcttctgccatcttttctctccaatgcatgccagaggcgtggttatgattagcaaaatggatgttgcaagtaactttttcattggattggctagaagtgtcatagagagaccccatcccgctttctttggcatgaacagagtataaaaatctcgcaggggccggg[138 bp omitted]gtggcgggcgcctgtagtcccagctactcgggaggctgaggcaggagaatggcatgaacccaggaggcggagcttggagtgagctgagatagcgccactgcactctagcctaggtgactgagtgagactccgtctcaaaaaaaaaaaaaaagaaagaaagaaaagaaaaaagaatcccgcaggtcacctgaaccttaccgtgctaggtatgggtagagggctctgcacttgtccaggttccagccaacttcatgaaggatttttattgcctgactccgagtaaaaggttagctaaatctgggctgcaaggtgcaaagtcctggaaaaggaagagccatgagggacttcttttagctcatcaaccaagatccacaattctgtgtagcataatttggtcagagatgtgttgtctcgggcagactattgtcatcctctaccgacactgttggaagctactgatatggactacaaagaatccaggagtcctgaaaccaagtcatttggagtcagtcaagaccaatagca[145 bp omitted]accccggctctactaaaaatacaaaaattagctgggcatggtggcacatgcctgcaatcccagatactcaggaggctgaggtgggagaatggcttcaacccgggaggcggaggttgcagtgagccgagattgggccaatgcactccagcctgggcgacagagcaagactgtgtctcaaaaaaaaaaaaagaggctagagttgctggagagagcttacttaggacatctaacccagctttagtctttcccagggctgggttgccatgaagcccacagggaactttctttcagattccacagagcagcctagagcccctaaaagcgatcatccagtacagactgccaatgaagaagaacaacaacttgtactctgtaagtgtgggaggtgggcactggggaaaggggagggcggggccttgcaagaaaagtgggcgtggcctaagtggaaggtgagcagagggaggaggtcggacctggcaagggtgggaactctcaaaggaagtaggtggggactctcaaaggaagtgaaaggtgaggaaaggaagtgggtggggccttgtgaggaaagtgggtgtgacctttcaaaggacgtgaaatgtgagcagagggagggggtgtgaccttacaagggaagtgggtgtggcctttcaaagaaagtgggaggtaagcagagatggaatggggcctcacaaatgtggtaggtgggggtttgcaaagggatgtgggtggggcttcataaatgtagtgggtggggctttgcaaagggaagtggatgtggcctttgcaaagggaaatgggaggtgagcaatgcgtgggggcctagcaaaaggacgtaggcgggacctttgggacgcatttttcccttctggcatgaagggactgattaatgaacagtgtctgttctggctaattactgctgggcaacaaatcaccaccaaaactggtggctaaaaaaaatcagtcattttgttattaattttttcccaagaacattaagataattaaacaatatactaaaaagttgaaaattatgttaaaactaacaacattaagtttaaatattttatttatacccaagccaaaatttgttataacaatgactaagacaaccaattagaattgcagacttctcaggagatcgagaccatcctggtcaacatggtgaaacaccgtctctactaaaaatacaaaaattagctgggcatggtggtacgtgcctgtagtcccagctactcaggaggttgaggcaggagaatcgcttgaacccgggaggcggag[186 bp omitted]aaccccgtctctattgaaaatacaaaaaaattatccaggcgtggtggtgggcgcctgtagtcccagctactcgggaggctgagacaggagaatggcgtgaacccaggaggcggagcttgcagtgagctgagatcgcgccactgcactccagcctgggcaacagagcaagactccgtctcaaaaaaaaaaaaaaaaaaaaaattacaaactttttagaggttcaaagtgaccactacagcaacagtcttaagtctcggataacttaaaagactactttgttagcaataacacttacagcagggtttctcaacctccttgctgttgacatttggggcaggtaattctctaaggagctgtccgacgccctgtaggatgttgagctgcattgctggcctccactcactggatgccaggaatatatcccctgcctcccacttgaaacaaccaaaagtgtctccagacactgcctaatataccctggtggggggagggtgggcggtggtggagtagtatcacccctggttgaagacgctaatttataggggagagtcacatagaagggcatctactcctctgcaagggagagtagaacctaccattttaagattctgtttaggctgggcacagtagctcatgcctgtaattgggaggctgaggtggacaaataacctgaggtcaagagttcgagactagcctggccaacatggagaaaccctgtctctactaaaaatacaaataataataataataataataataataataataataataataatcgcccaagcacagtggctcacacctgtaatcccagcactttgggaggctgaggcgggcagatcatgaggtcaggaggtacagaccatcctggccaacatggtgaaaccccgtctctactaaaaaatacaaaaaattagctgggcatggtggcatgcgcctgtagtcccagctgctcaggaggctgaggcaggggaatcacttgaacccgggaagcggaggttgcagtgagccgagatagtgccactgcactcaagcctggcgaaagagcgagactccatctaaaaaaaaaaaggctgggtgtggtggctcatgcctgtaatcccagcactttgggaagccgaggtgggtggataacctgaggtcaggagttcgagaccatcctgaccaatatggtgaaaccccacctctactaaaaatacaaaaattagccgggcgtggtggcacgcacctgtagtctcagctactcaggaggctgagagaggagaatcacttg[131 bp omitted]aaaaaaaaaacagccaggcgtggtggtgcatgcctgtccaagctactcgggaggctaaagaggatcacttgaacctgggaggtggaggttgcagtgagctgagatcacgccattgcactccagcctgggtgacagagcaagactcttgtctcaaaagaaaaaagaaagaaagaaagaaaaagatttagtttaggacccagaaatgagcaaaaacgaatgagactgagaaagtggactgtgacatttgggaaggaaaatggccgagtaagacaatgaactgtgccagttgtgatgcttggcatctgtgtgcccaacagactgaggaccaacccagatctccaagacaggggattggattggaccagcatgggtctggtgcccatcccaatccagtcatttgtggctgtggaagccgggggtcttctaccggcctttgaaggaacaccctttgtagggagacctaggggcatctctgagaaaggacaggttcccccagagggcttgtgtgtgctcttcctctcacccttgccctaccttgttacagattatctgggcaaagggctttgcctgctcagatgaagccagcatcaccctgggcaggtttcaggcaacactggccatctgtagaggactttgaggggccttttttttttttttttgagatggagtttcactctgttgcccaggctggagtgcagtggcgtgatcttggctcactgcaatctccacctccccatttcaagcgattctcctgcctcagcatcctgaggagctgggattacaggcgcctgccaccacacccggctaatttttgtatttttagtagagatggggtttcaccatgctggccatgttggtcttgaactcctgacctcgtgatccgcccacctcagcctcccagtgctgggattacaggtgtgagccaccgtgcctggccgaggggcctccatctttaagtcagcgcatcaccctcatccagtgctttgttgggggttcaatggtagaatttctgcagatcccatgtgatgctcagtcgatacaacccaagagttcactttgcggcaccgaattctgtcatagttaagagcacaggctctggagtcagaccttgggtttgaatgctagctcctctcttcacttgccttaagtaatctgccttgggcaagtaatctaccacccctgagcctcagcttcttcacctgccagagtgaggcaatgcatcaattatcaataaggatgcctttggtcgtaagtgacaaaagtctgaccccaaatggcttaagcaacaaacaaacaaaaagataatctgttggaccatgcaactacagttcagggcgtggatttcaggcatggctggaaccaggggctcaaagaatgtgcccaggctctattttcctttctctatttcttggctccgctccagccttgctttctcacatagtcctgagatggttcagcagctcctagagctacatcttgactcattcacatacacagtctgtgtctcagaattcccaggtaaagtcttcatcttcattatgattggaccacttgaggtcacatgtccagacttgatccaatcaccataacccaggctgatagaacagtttgagccaattagggttgacttccagatctgtgggtgaagtcagccccatccaattggtgactaagaagtagagtggggagtggaatttgggaaggcagcgaacaaataatacctaactccgtagaacacttaccacctgccaactactattctgagcactttgcatatattaactctcttactgcttagaacaacccaaggagttgcgtcctgacatcattcccattttacaaatgaggaaactgaggcacagggagcttaagtggcttggtgacgctgcgaggaagtggcagaactggaagcagagatcttgggacttttgtaagaggtgccaggactggcacatcctaagcccttccacctgctgaggatcattctttaggaaaagctgataggacgaggtctggctgggtgagaggactcccgactgccttctcatcctccgcttgtcttttctgtccacagtgggatgatttcatggaacttggcagaagtatccctgacacccaactggagcaggtcatcgagagccagaaggcgaatcaatgcgcagtgctcatctacacttcagggaccacaggcatacccaagggagtgatgctcagtcatgacaacgtacgccaaagtccctttgctctggagtggtggcctttgggctgtttctcttgttggcttccaggggcagggtggcattccagggtctagtacgcagtgtggctccttcaccattgggggttagagagtagcgtagttgcttcactagggggcagcagagtgcagtgattgagatcaaggaatgctggccatgtcaaaagcagaaaaatgtctggcagggtatgcacccagcagacaatgattcctctgtgtgagtcaggaaggttgtgtgtgtgtgtgtgtg[131 bp omitted]cagcctcccaggtagctgggattacaggcacccgccaccatgcctggctaatttttgtatgtttattagagacagggtttcaccaagttggccaggctggtcttgaactcctgacctcaggtgatccaccgccttggcctcccaaagtgctgggattacaggcatgagccaccacgcccagcctactttatttttcagttgtgtgtgtgttttgttttgttttgctttttgagaccgagtctggctctgtgccccaggctggagtacagtggcactccactcactgcaaccactgcctcctgggttcaagcaattctcgtgcctcagcctcctgagtatctgggactacaagccagtgccaccacatccaactaattttttgtattttgggtagagatggagtttcaccacgttgaccaggctggtctcaaactcctgacctcaagtgatctgcctgcctcggcctcccaaagtgttgggattacaggcgtgagccacagcacctggtctgtttttacactgtttttagagatgggttcttaccatgttgcccaggctggagtgcagtgactactcacaggcacaatcatcatgcacttaagcttcagactcaacaggctcaagtgatccttctgcctcagcctcccaagtagctgggtctacaggtgcatgcaatcacacctggcctgctggtttttaaatgaagaatttctataaaagcattcttataaatgcttccctgccccccctcagcctagggtaatagttaccagcacacactggtgtctgaccacctcagtgttggaatcctggctttgctacttgtaagtaaccatgtaagctggtgtgacattggtcatatgacatcaccaaactgtgtgtcagtttgcccaactgtaaaatggggagagtagagggcccaattctggcagagggcctggcccatggaaggtcagcaatggaagattgcaaaagtcagcctccactcccttaatacactgtctcagctagtgctgtatagcaaggtgtggagctaggatcatccccctgggtctggaggtcccgatcctagatccacaccctggaaatcttctctgaatttctcattttaacatgaatccaaatcttttgccaacactgtctccttcagcagaactcctttcctcctcctgcatcttagctcaaggcctcttagaagttttctgatttttctacaactatggtttttactctcccacactgtctgtctgagcaatatcacgggcccaggactaaggtctatatgtaaattaaaacttggcttcctgtaaaatttgatgcataaatatattttgctataacaacaaggaaagcaggcttcaagtttggcaataaatcacgggagtacaaattaaaagttcagacattacagaagcccttggactcaattgtatgatgcatgatagagaaaaattatttttggcccagtctccatcatcgctcccctggacctgtgtggttgcttccaccccatccggttacccgcctcccacccaactcccaccctcacccccacccccagtctatcctctctacagccaccagagagtgcctgtgagcacctgagtcaagtcccaatcctcctctgtctgcagccctccatggctcccacttccctccaggtaaaagcccaagtctcctgaggcccacaaggcactgcaagcctagccccatctcccttctcctctcctctcctccctctctcccccttgctcactctgttctagccacatggtcctccttgctgttcctccaacacaccagacacgtcctgcctcttggtctttgcatgagctccgtgggaagtatttttccacacagcttgttccctcccctccttcgggtgggtctctgctcagtgtcacttcctcagtgaagccctccctaacttccatgtttgaaatagcaaacaataaaccaccccattactacctaattcccatttggctactttttttcttccttagaaaattttgacactgtcatattatatgctcatttgtttatcaggaacatcagctccttgaggtcaggggttttctgtcttattcactactgtaactgcagtgcctgatgagcaggaggactcaatccacttttgggaaatgaatgaatgagggaaatctgattaaacaggatattcccctctatgctggctagtatttatgctcctagtggctgcatgtgtggtaagacattctcctagcacaggcattatgagcatagatcctggagcaagactgcccactttttaaaggggctggtttttttcttattaagttccttatagattctgaatattagtccttttttatttttattttttttgaaacagagtcttgctctgtcatccaggctggagtacagtgacactatcgcggcacactgcaatgtccacctcccaggtttaaacaattctcctgcctcagcctcccaagcagctgggattacaggcacccaccaccacacctggctaatttttgtatttttagaagaggtggggcttcgctatgttgggcaggctggtctcgaactcctgacttcaagtgatccacccacctcagcctcccaaagtgttggaattacaggcgtgagccatggcgcctggccaatattagtcctttaattgatgcacagttgcaaatattttctcctattctgtaggttgtctttactctgttaattgtttcttttgctgtgcagaagctcttaagtcccaattgtccatgtttggttttgttgtatttgtttttgtggtcttagtcataaattctctgcctagcccaatgtccagaagaatttttcctaggttttcttctagtttcttcattcttctgcacatggctagccagttttcccagcaccacttagtgaataggatgtccttccccattgtttatttttgttgactttgtcaaaaatcagttggttgtgtgtggcttaatttttgagttctctattctgttccattgatctctgtgcctatttttgtaccagtaccatgctgttttagttactatagccttgtagtataatttgaagtcagataatgtgatgcctctagctgtgttctttttgcttaggattgctctatttgggctttctggttccatataaattttagaattgttttatataattatgtgaaaaatcatattggtaatttgataggaattgtgatgaatctgtagattgctttgggcagtatggtcatgttaacaatgttgattcttcctgtcaatgagcatggaatgcttttccatttgtgtcatctgtgatttctttcatcaatgttttgaaaagttattctcgtagaagtctttcatctccttggttaaatgtgtctgtgggtattttattttttgtgtagctactgtaaatgggattgaattcttgatttggttttcaactttaagaatattggtatatagaaatgctactgatttttgtacattgattttgtatcctgaaactttattgaagtcatttatctaggagtgttttggaggaatctttagggttttctagatgtagaatcatatcattggtgaacagagataatttgacttcctctgttcctattttcctattcatacatcttttatttcttgcttgtgcctgattgctctggctaggacttctagtactatgttgaatagcagtggtgaaagtggatatccttgtcttgtttcagttcttagagggaatgcttccaacttttccccttcagtatgatgtttgctgcaggtttgtcatagacagctcttattattttggggtatattccttgatgcctagtttgttgagggttcttatcataaagaatgttggattttgtcaaatgctttttctgcagccattgagatgatcatatggcttttgattttaattctgtgtatgtgatgaatcacatttattgatttgtgtatgttgaaccatccttgcatcccaggaataaagcccacttaaaaagtatctttattttcatttgtttcaaagattgtttttattgcttctttaatttgtttacccaaaagtcattaaggagcaagttgcttagtttccatgtatttgtgtggttttgagggttcctcttggtattgatttctaattgtattccactgtggtctgagaagatgcttggtatgattttgatttttttaaatttattaagactttcattgtggcctagcatgtggttaatcttagagaacgttccatgtgcagatgagaaaaatgtatattcagaggccactgggtagagtattctgaagatgtctattaggtccatttggtcaactgtccaatttagtctagtatttctttattttctgcctcaatgttctgtctgtcagtggggtgttgaagtccctcacaattattgtatggctatctcttaagtctagtagtacttgtcttataaatctgggggctctgatgttgggagggtggttagatcttctggttgaatttaaccctttatcattatataatgcctttctttgtctttttttttttcttaactgtcattagtttacaatctgttttattggataaaacagtagcaccctctcatcttatttgttttctgtttgcatgatagatctttctccatccctttactttgagcctctgagtgtcattacatgtgagatgggtctcttgaaggcagcagcaggttgggtcttatttattattattttttatcaaatttgtcactctatgtcttttaagtgctgtatttaggatgtttatgttcaaggttaatattgatatgtgaggttttgttcctgtcatgtgtttttgctttgtattcttgattgtttagttgctttatagggtctgtgggctttgtgcttacatgtacttttatggtagcaagtattgttcttttgttctcatgtttagaactcctttgggcatttcttttcgggctgatctagtgatgacaaattcctttacatttgcttatctgagaaatattttatttcccatttatgaaacttagtttagtgggatataaaattattggctggcatttatttttctttaagaaggctaaaaatgggccctcaatctcttctggcttgtgaggtttctgctaagaaatccactgtacgtctgatggaatttcctttatatgtaatttggcccttttctctagatgcctttaagatttattttttttctacattgaccttggtctgatgactatatgcctcgggggtggccatattgtgtagcatctcacaggagttctctggatttctcatatctagatgttgacctctctggcaagattaggtaaattttcctgtattactccctcaaatatgttttccaagttgcttaatttttcttcttttctctcaggaatgcatttaagtcacaggtttggttgctttacataatcccacatttctcaaatactttgggttttttatttcttttttctttacttttgtctgagttgtttgaaagaccattcttcaagctctgaaattctttcttctgcttggtctagtctaactatatttttaaatttctatagtgaaattttcaattccagaagttcaatttggttttttcttaatatatctatgttgtatttcatatattgaagtgttcttctagtttccttatattggtttccaactttctcttggatctcattaagtttccttccaattcatattttgaattctttatatgtcatttcaaacatttcagtctgatgaggacccattgctagagaactggtgagattctttggaggtgttgaaacactctggctttttctactgccagatttcttgcactgattccttcttatctgagggagctgtcacttcttgtttttgaatcttctattgtttggatggggcttttgtattttttaattctagtttcccttgagggtatggctgtggtgtatgttgtgtgtgattgtatggccttgcttctgagtgcttttgggggccaaaggtctgtatgggttccacggttgtggacagcttctgtgcagtggctaaggtctgtacgggttccatggttgtggacagcttctgtgcagtggctaaggtctgtatgggttccatggttgtggacagcttctatgcagtggctttctcagatgctgcttgttgtaatgatgtaatggacataacagccaacactatctcctgcaggactgagggtgtggaggtctcaggaggcttatctcatgcactgtcaataaacccttccagtagcaagatttttgtttggtggtgcagtgcaggatgcagtccagtagatcgcacttaaaagttagaaccagcaggtaggctggtgccaagtaggcatgcataccctgatggaggtagcaggaagagatcatgatggggtgcactgaggtctcaggggtaggggcagggaatgcaccagctccttgtcctcagccagcaggaatgcagtccgcttctctatcacacccctgtcatggggctcacaatcttctgtttataaaggcttcatcctttagttcctggcagcagtgtggggtgggagggcaggtgggaaatgaccccttctccatgtcttttcccaggcatgggtgctgcccactccagtggtttgtgccacacccacatttcctttgtcccaaggggggctttggtgggctgcattctcctcctcctttaggggttacccatgccaagggttagatcttcagggatcctgcggccccccagaggctcactggtcccttgtgcttgccaaagtcacagcgcgttgtggggtatgtttgtggggaatctggtggtgcagtgggtcaagggcagagaatccccaggcagggcagtggcaccacaggtgcacaaccagtgtggtgcctgctgtctcagttcaggtctgaggggagtgtgggcatgcctgtgtgaactgaccacctggttctctgtccctgggaagttctctaatcagcaccgatggtgttggcctgggttgcaagggcagaggagctccctgagagtttagtgaccaggatattgtcaaaggcgagtgggaagcaaagaagcactcccacctatcctttccatggggctctgagttcctcaggagctgatctttgacaggcccttgcagctttcctttcctacgccgcagcttcttcctgtgggcactccaagaggtcctgcctctccttcctccattttcagttcaaaacttatccatttaccagtaattttgatcttcttcctgaaaactgacatctgatgtccgttgtcagccatcacgtatcaatacactgttagcaagtggcagattctcattcatatccttctggttccaaaccacaaggctttccacaatagggaagatgacacttgtcagccacgctgagcccaagccacagggctctgggcagggtcatgctgtctgtgggtagcttacaggaccaacatgaggacatcactcttgaactattttttttttttttttttgagacagagtctgctctgtcgctcaggttggagagcagtggcacaatctcgactcactgcaacctctgcctcccaatttcaagcgattcccccacctcagcctcctgagtagcagggattacagacgtgtgccaacacacccatctaatttttgtattattagtagagatggggtttcaccacgttggccaggctggtctcgaactcctgacctcaggtgatccacccgccttggcctcccaaagtgctgggactacaaacatgagccaccacgcttggccatcactcttgaacttcttaacctggtggctgactctcccaacagcaagtggtcccaaagatttgtcagtcccagaatttccacagcatcccttctgctcctttctgtcagtcaaaacaaatcactggaccaattctgtctcaaaggaaagagaaacaaattccacctcagaatgggaggagtagcagagaatctgcagctctgtttaatctaccacatatacataaaatgcttagaacaatgcctggcatacaggaagccatgtcaaggatagctattaatattgtatttggctgggtgcagtggcttatgtatgtaatcccagcactttgggaggccgagacaggaggattgcttgaagccaggattgtttgagagaaggctgggaaacacagcaagacctcatctctacaaaaatgttttaaaaattagctgggcatggtggcacatgcctgtagtcccagctactcgggaggctgaagtgagacgatcccttgagcccaggagttcgaggctgcagtgagctatgatgctgccactgcactccagcctgggtgacagagtgaggccctgtctcatcatcatctttacagcaagaagttaaaggtagccttagattcttgccagatgtctacagctcagtgtttctcccgtgtagggaacactatgttcagtgctaagataaacacattttaactccccactaaaaccccacgaggaaaattttgtcactaacccttttacagatgagaaaactgaggctcagacagaggaaattacttggtcaagatcacagagcaagggaagctctgaactgagatctgaaccaggagtgtctaaaccattgtacatcatagactatacacaacaagccccttctctcaacaagtgtgctaggttccttgaaccctggactgtgcatgacaaggtttatgggagccttcatcctgagcccagggaaagaagtggaactagccttgagggatattttgggctgactgctttatgtcctttactgcagttaaccattccttctatttcctcattcattcaagaaaaattcattgagcacctagtatgtactggggaatattccaggagcaggggaaacagcagcaaacaagacagactcaatctggaccttgggaacagataagaaatgaacaaatgaaaacattcagtttgtgtgacatggtacgtacagacttaggcagtcaatggcactttcaccttagatggtgtgagatggcccttctaaggaagtgacatttcagctgagacttaatgttcaagaagtagccagccatgggggtgggggacggtgagggaaaaggctgaagaaagagcattccaagcagggggaatagccagtccaaaggccctgaggctggaccatgcctgatgcattggagcaacagcgaggaggtctgggtggctggattaatgaagtaactattcaccagagatttatgacactagtgagaaatataagtgacaaaattataggtacactaaaactttacatctacatatgcattggagaaagaaaaatgctaataatgctaattactggggtgtttatatgatgggattatgggtagcctttttgtttgtttgaccatgttggttccatagttctatattggacctgagaagcctctgtccccactttaaagaagaggcaataaaagccacgagggattttaaggaaatagcccaaatgtctagcaaacagtggagtcagggtttgactctgggacacttgctgaatccagttttctgagttctgtcgttggacccaaggaagtctgcaacctccctactcctaaagctgcctgctaaattttgcaactcctcctaacttcaggcaagttagttaaggactctgtgcttctgttttcacataattctccctgattaaaaaaaccgttagacctagggctttacccaaaaaaatctgtcgaatgattaacaaccatctactcacctgggctacccaagaggctgaagtgggggccccaggtccttactcgatcttaccttgagagcatctgcttgagcaaagtatgtgagcgccccaatctttatgggtacccagatgtccatcatctgtgctgcaatatggctgagtgggaggtagctgaccaccatctcatgcttgtctgtcagttgaaagtcctttgccactgctcctgccatccacgtgatctgtaacataagggacaatccaaggtgccttatactgacttatgaaaaaacaacacacacacacacacgcactcagccagactgcagcacagacaatggacatctgggtacccataaagatcggggcactcacatactttaggcttaagcacatgctctcaaggtaagatcgaataaggacctagggcccccacttcatcctcttgggcagcccagatgagtagatggttgttaatcattcgacagattttttgggtgaagctccaaaaattttgggagaattatagttaccaacccccaggtgttatgatgattaaatgacttggtgtttgtaaagtatgaagacagtgtcttggtcatagtaggtgctttataagtgtttacttaattagtttatttatttagctaaatacatttaaaatcgccctccaggctgggcatggtcgctcacatctgtaaacctagcactttgggaggctgaggcgggaggtcgctggaggccaggagtttgaggccaagctggaaaacatagtgagaccccctctctacaaaaaaagttaaaaaaaaattagctgggtgtggtggtgtgtgcctatagtaccagttactcaggaggctgagatgggaagattccttgaacccaggagtttgaggctgcagtgagctgtgatcacaccactgcactccagtctgggtgagccctgtctgaaaaataaataaaaatttaaaaataaaatggcccttctatgagggtgaggcaccttggattgtcccttatgttacagatcacgtggattgcaggagcagtgacaaaggactttaaactgacagacaagcatgagacggtggttagctacctcccactcagccatattgcagcacagatgatggacatctgggtacccataaagattggggcgctcacatactttgctcaagcagatgctctcaaggtaagattgagtaaggacctggggctccgacttcatcctcttgggcagcccaggtgagtagatggttgttaatcattcgacagattttttgggtgaagccccatgtctaacggttttatctctgccctcatcttaatgctctatttagaagcattaaaaacaagaccaggcacagtggctcaatctgtaatcccggcactctgggaggccaagacgggcagattgcttgagctcaggagttgagaccagcctgagcaagatggcgaaaccctatctctacaaaaaccaataataatagtaaatttttctaaaaaacaaaaaacacctgaccaaataaaacaacttttttttttttttaaccagctggctacattctcctagtttttatctttatccaagtcagggcatccatgtatggttatgtagattgaacactgaacaacccaagacaaagatgtacttggtactgaaagtaaagagtgtgtgtgtgtgtgtgtgtgtgtgtgtgtgtgtgtgtgtttataagtcagtattcccaaatctaaaaagctccaaaaaacaggagtttttggcagcaaagtctgatctgaattgataagatgttgtttgtggtcttcattttattccacttactgggattatgcatatatttgtagaatttttataccaccttttcttgacttataccctttaagtattatcttttgcctttctattgtggtgaggatttagctcccttcctctcccgtcttctcatttctccttccccattctctcaacataaattattcttagttaactgagccaagtagtttatcatatgattccacttcctgcttggtacaactttttgtttttcccagaattaagttgcctttcttttccagtttggtgaagtttttgcatacatgtccagttgctccatctgatctgtcacatgcttatcaatagtctccaaatgttcaaatattcattgcattattattattattattattatttgagatagagtcttgctctgttgcccaggctggagttacagtgccatgatctcggcccactgcaacctctgtcttccgggttcaagcaattctcgtgccttagcctcccaagtagctggaactgcaggcctgtgccaccatgcctggctgatttttgtatttttagtagagatggggtttcacaattttggccagactggtctcaaactcctgacctcaggtgagccttggcctcccaaagtgctgggattacaggcatgagccactgcacccagctccattgcattatttttttcctccatccttttgcacttagctggactgttgttttaggttgtcttaggttgggtaccctagaagcaaaatctgagttggagatctttgtgatttatcaatggggagctctcaggtgaaaaccaaaaggaagtgaggagagaaggataggctgggggaaaaaacaagaaaggacacacattcagctggattgtaacttcagactgatcccataggaagctctgaggcatgaacgacaccagagttgttccactttgaggcaaggaggctgtgcttttgtaaccccaactcagatagtcattggctgtgggctcaggcatccatgtgggatagggagcataacttcccagttatttctaagtaagggcggttttctggaaaagagggaactgtgggccactagagatctgataggacatcaacagcatcttctacaagctgccatacagggatatccctttttcccactcctgggttggatcccctattttctggggtctttgccttcttttttggattattccttgatttagctggatatcattcattggtaggttttgcaaagtagttatgtgaaagaacactttgatttcttttctaaatttttttttttttttttttttttagagacaaggtcgtgctctgttacccagcctggaatgcagtggcatgatcatagcttactgcagccttaaattcctgggctcaaaggatcctcccacctcagcctcccctgtagccagaactacaggcatgtgccaccatgcctgactaatttgttttacagtgattttctacatgtctagactttgcaaacggagccagaaaagaactctgacattttccccaagttacattctctgaattagtttcctgttaatgccacaacaaatgaacagaaacttagtgacttaaaacaatatttatttatttatttagaaatggagtctcgttctgtcacccaggctggagtgcagtggcagtggcatgatctcaactcactgcaacctccacctccgggttaaacgattctcatgtctcagtctcccaagccgggattacaggcgtgcaccaccacgcccagctaatttttgtatttttagtagagacgggatttcaccatgttggcaaggctggtcctgaactcttgaactcaagtgatctgcttgcctcagcctcccaaaatgctgggattacaggcataagcaagcgcgcctggtccatttattatcttatagttctggtggtcagaagtttgaaaatggtctcactgggctaaaatcaatatgtcatcagggctgcattccttctagaggctcttggggaccttttccagcttctagaggccacctatgttccttatctcagggccccttcctccatcttcacagccagcagtgcagcctcttcccctctcctgcttccctcttataaggaccctgtgatgacattgggccacccagatcatccaggatgatctcccatctcaagattcttaacttaatcccatctacaaagtcccttttgccatgaaagattacatattcacaggtcccaggagttagaacgtggacatctttagggggccattattttgcctcccacactctccatcaagcaggctaaatcttagggcctttgcacgtgcttctagaaggttctttctcttgttctttgcagggctgactcttctttgtcacttagctctctgctaaatatttccttggcccctctcaatccctctcatatgccccatgctcagtgcctgagatgtgttaggtcttcaatacatatttcctttcttggctgaatacataatacatacacatttacctacaggacctgagaagttcccattttcccacatccttaccaactcctaatattgtcaaaatgtttacaacttgtcaatctgaatagtgacaaaagtgtcttaatattttcagaaatttccagattgttttctgaagtacgtgcaccagaaatgtgcgaaggttacagtttctctacatcttcactaacgcatgttactatctgttttattattattattgccattctaatttgcatttccttggtgattaatgatagtgagcatctcttcatgtgtttattgaccatttacatatcttctttggaaaaagaaatctgttcaaatagtttgcccatataaaaatgtggttgctctttctgtgctagcatgactagtaaaaagaaaagtaaaagccaggcacggcggctcacgcctgtaatcccagtactttgggaggccaaggcaggcagattgcttaaggtcaagagtttaagaccagcctggccaacatggtgaaactccgtctcctccgtctctactaaaaaaaaaaaaaaaaaagaaaaagaaaaattagccaggcgtggtggtgtgcacctgtaagcccagctactcaggaggctgagacaggagaatagctcaaacctgggaggcaaaggctgcagtgagccgagatggtaccactggactccaaccggggcaacagagggagactgtgtcaaaaaaaaaaaaaaaaaaaggaaaggaaaggaaggcaagggaagagaagggaggggaagggaggggaggggaggggagaaagaaggaaagaaaggaaggagggaggaaaaaagaggaaggaaggaaggaagaaagaaaaagaaagaaaggagaaaggaaaaaaattaaaaatgaaaaaaattggttgcatatctaatctcattgttgagtgttaagggttctttatatattctggttacaaatcctttaccaaatttgtggtttgcaaatactttctcccagttctatggcttgttgtttcctcaataatcttttgaagaggaaaaagtgtttaagttggatgaagtttgatttatctattttcttttatgcttttggtatcatatctaggaaatctttgcctactctaaagtcacagggattttcttctacgttttcttccaaaaggtttttagtttgagctcttacatttagggctataatgcattttgaggtaattttcatgtttggtgagaaataaggctctaaccctaaattttgtggaagcgtttgtttgttttattttgttttgcatttgaatagtccccacccgcccccccccccaacgaaatttccttggcattttgttgaaaatcaactgagcataaatttaaggttttatttctggatcttctattttgttccactgatctgcatctctgtctttacgccaaagcctcactgacttattacactagcttgatagcaggatggctaacgtttcctggtttgcctgggacttccccagttttaaaacagaaagtttcacatttcagatattcctgcagttctgggtaaaccaggacggttgttcaccctactttagaataaattttaaaatcaggtagtaagtcctccaattttgtctttcttttccaaaattgcttgggctattctaggtcctctgcatttctatataaattttaaagtcagcttgtcaatttgtatttaaaaaaaaaaaaacttgcctagatttcgataggggttgcattgaacctataggtctctttgggggagaatcttgcatccttttttaacagttgtgtaatattccactgcatgcttggaccacagtttctttagccaaccctttgtcattgaacctgtaagctgtttccattctgttacaaaacagtgttgcaaagaacgtcttgaacgtgtttctttgtgtgcctgagtctttccttcagctgaattccttcacccacagaagtgaagttgacaggttgcacttaaaatgttaatagaactgtcatgttaccttccaaaaatattttaccagtttatgcctctcatcaaatccctagacagagtgcaaaaatctgactggccaacccagctaatgggttgtctccttttggttgggagtcctgcgtaatctgatcagtgaaggaatgttctcttgggcaaagttgggtggatcaggagagatggacatccctggtgcacggaaggccctgctgtggctaacctagcttcgttccatacagggcaccttggtaagtactctaaaggaggtaaaacctactgtcttcattggagtgcctcaaatttgggagaagatacatgagatggtgaagaaaaatagtgccaagtccatgggcttgaagaagaaggcattcgtgtgggcaagaaacattggcttcaaggtcaactcaaaaaagatgttggggtaggtggagcatccagagggctgggagggtagttggtgaggaggctcagccttctccagtgggtcccatcagcccttctccacttgacggcattcttattcacaggaaatataatactcccgtgagctaccgcatggctaagactctcgtgttcagcaaagtcaagacatcccttggcttggatcactgtcactcttttatcagtgggactgcgcccctcaaccaagagactgccgagttctttctaagcttggacatacctataggcgagttgtatgggttgagtgagagctcgggaccccacacgatatccaaccagaataactacaggcttctaaggtaccagcccccggggcagacccctgctcctcccataacatggggtcaagagggggaaggtgggtggatagatgggcctctgggttaagaggaatcctgacgtggtgtctccagaatgatcctgttctccagcctccaagtcctaactccgcatgaccgtgggaaaccctggatggtaagagagcccacagataagggggatggctctctgaacattccatggtctccccgtttgtcacttgtgagttctgccttcaaggtcaccgcctgtgacctcagcacctttcatccccatgatcctccatctcaaaacacctccatggccgattcctggctttctcccaagctcagcttgccctaggctgcaaggttgaacccaatgataagaaaactttaagaataccaaattgaggttcaactccccatctgagagctgtcagtcatagaatcttctggttgtgtctctccctgactccctccttttagcatgggtgaggtttgaaaaaatcttttcatacatgtgtttatttattaaattttaattagagatagggtctcactttgttgcccaggctggagtgcaatggtacaatcatagatcactgtaaccttgaacttctggattcaagcattcctcctgcctcagcctcccaactagctaggactacacgcatgagcctccatgcttggcaattctgtaaaagtttttttgtagagatggggtcttgccatgttgcctaggctggccttgaattcctggactcaagcaatcctcagcctcccaaagcgctgggattacaggcatgaaccaccatgcccagcattgccatacatttaaaagtcatttgtacttcctttcctatgagctgtctgtccatattatctgcctgttttaaaaattagattattggtccctttattattggtttgttggcactctttacatattaggaaaatcagccctttgtctttcatatgagttacaaatattttatcccctggcttgtcattggtattttgattttagttaagatgttttttactgtgcagaaatttgtggtcacaaatttagatggttgaacttatcgatctcttatggcttctggatttttctatatacctaaaaaggcttcagtgggggaaatcataaggcagctctttgtaagttttaaatttctcaggtctgtcttcattttttcttttgctaaccaggggaatacctacatttaaccctgggaccattggccttgctaactgttaatcaaagagatctcagcaacacacggagaaaatatttcctttcctgcatcctagaactgcactggccagtgctatctctaggaaaaaaaaaaaaaaagacaaagaacccagatttcaaatagtgctactctgttttatgaaagtaacttttacctctaaagagattgtagttggttgccgtacttaaaattagctgtcctaatcactgcagagaggtctacctgttttctttaaaatgagggttttgttcctatctttaagccaaaggcatttttttctttgccggcatatgtggagatgaaaaaaaaaaaaaaaaaaaaaaaaaaaaaaaaaaaaaaaacgaaaaacagcctgcaatgctgctggattttctttcattttttgtttttgtttttgtttttgttttttgagacagagtcttgctctgtcgcccaggctggagtacagtggcgtgatcactactcactgcagccttgacctcctgggctcaggtgattctcccacctcagcctcccaagtagctgggaccacaggtatgtaccaccatgcccaacttttattttttattatttttgtagagacggggtctccgtatgttgcccaggttggtcttggaactcctgggctcgagcaatattccctcctcggctttccaaagtgttaagattacaggtgtgagccaccacacctggccactgctaggtttcccagttcacaaagcctttgggaatctgacacgctggattaaacactgcagcaaacacctccttctgtgcgctggggtgcatatccagcctgctctagctgagcagagtattaggcacctaggctgaagatccaggcagagctgggtggctgactttgtccctatgagcctgtttctctgcttctgtcccctggcagctgtggcaagatcttgactgggtgtaagaatatgctgttccagcagaacaaggatggcattggggagatctgcctctggggtaggcacatcttcatgggctatctggaaagtgagactgaaactacagaggccatcgatgatgaaggctggctacactctggggatctgggccagctggacggtctgggtttcctctatgtcaccggccacatcaaaggtaccaggggctgagctctttgggaatctcctgcaagcaggcccaccctgaacatttaagggcccagggtaccagcacgaaggccacccccagttcctcaccttccaagaggagctgtgcagaaactcctcagtctgtacaacccagctctatcctcctgtccagcaaacagttaccccttggtcacttggtatcccgtggtccaccctcaggaggatggacctgcaaaagacaagccttggaacctcctgaagcccctttcagaatagcaccagcccagaggaaaactcagtaagagaaggataaagaaattccttgtgacatcattttggcacctggatccagccatatctgaaagccaaagaccttttgaacttttcagttatattgagccaacagttttacttttttttttttttaactcaaactcattcaagctggttcaaatgggcttgagtaaaaaagtgccatcttctcctgcattttaagaggataataatcgacagagttgtaaggattgaagaaagtatagaacaaggataagccaacttttcctgaagagggccctttagtaaatatttttgggttcacaaaacatgtgtctctgttgtagcttctcaactctgtgatttgtagcacaaaaacagctgttgacaacacataaagaatgggtgtggccagctgccaatatgaatatcataatttttatgtgtcaaaaaaaattcttcttttgacttccaacaacttaaaaatgtaaaattcatttttagcttttggttatacaaaattgaatagtggcctggatttggccactatgggccatagtttgccaaaatctgatggagaacacttagtgcttttttactcaaacccatttaagatgggtttaaataggtttgaggaaaaaaataaaaagcaaaactgttgactcaacgtaactgaaaaggtcagttggccaaaaggtcagctggcttcaggcatggctggatctgggtgccaaaatgaggtcataaggaattttaaaattcttttcttgagttttcctctgtgctggtactattttatttttcagagaaggtctcgctctgttggccaggctggaatgcagtggtccaattatgactcactgtggcctcaacttcccaggctcaggtgattctcccacctcagcctcctgagtaactaggactacaggcgtgtgccaccacacccggctatttttttgcagagacccaatttcactgtgttgcccaggttggtctagcacttgtgggctcaagtgatctgcccacctcagcctcccaaagtggcaggattacaggtgtgagccactgtgcctggccactaggtttttttttttttttttttgagatggtgtttcactcttgttgcccaggttggagtgcggtggcatgatctcagctcactgcaacctccgcctcccaggttcaagtgattctcctgcctcaacctcccgagtagctgggattacaggtgcacaccaccaaacctggctaatttttgtatatttagtagagacggggtttcaccatgttggccaggctggtctcaaactgggggttccacgttgtcatggctggacatgtaccaagccaagctctgttccagaaatccttatcactgctggtggtgaaaatgtgccccccattcctgttgagaccttggttaagaagaagatccccatcatcagtaacgccatgttagtaggagataaactgaagtttctgagcatgttgctgacgctgaaggtaacatgggtttgctgtcattgggggaagtctctgcagccggtcttgggttccctggccccaccccagggtcaagaggatgcatctgtgggttcaagacccacttcttggtctgtgggcctggggaggggtgctggtcaaggagcatgggtggtgacagaggtgtctgggggcagtgtgagatgaatcagatgagcggagaacctctggacaagctgaacttcgaggccatcaacttctgtcggggtctgggcagccaggcatccaccgtgactgagattgtgaagcagcaagaccccctggtctacaaggccatccagcaaggcatcaatgctgtgaaccaggaagccatgaacaatgcacagaggattgaaaagtgggtcatcttggagaaggacttttccatctatggtggagagctaggtgagtggccatgacatttggaggctggtcccttgttagcatctgggactgtgtgggctctgaagagacaggtccttttctgaaggtcagagggtctatgaaaccagccagggaccaggagagggaggctgccaccttcagctaactggtccccagctcctcatcttggaaataaaatccaacctccttactatagctctatacaatctctcgcctgctgacctttcattcactctgcaccaactctatgggctttcttgatgttcctgcagctctctgggctttgtccaactatagggcctttgcacctgccagtctgcctccctgggaatacccttccccctcaattccttgcctggatggcttcttctcattgtccaggtctcaccctacaggcctcttccccctcagagcagccttgttacaggacccccaggtttgtatgcccactgcacagtaatataccaatacactgagacagcaggggatgcagcaaagacagagtttaattatggccaggcacagtggctcacgcctgtaatcccaacactttgggaggctgagttgggcagactgcttgagcccaggagtttgagaccaacctgggcaacatggtgaaatcctaactctacacaaaatacaaaaattagctgggtatggtagcggtgcccagctactcaggagactgagaggatcgcttgagcccagggaggtcaaggctgcagtgagccacaatcatgccagtgcactccagcctaggcaatgcagtgagaccctgtctcaaaaacaaaaaacaaacaaacaaaaataaaaaaggaaattaaattcccttgcagggaagccaaccgagatggaaggaaccctcaaatctctctttgaggaattctgggctggggttttaaggggatctttgggggtgaagggctggaaaattagagtcattgattggttgaggtaaaggggatgaaatcatcggatgtggaagctgcattctttggtaagtcagctcccgtggggtccttcagatcagtgggcatcagtagtttcactggtatgcaggacttgaaaggatatctcagatggaaaacttgacctttcacaatgcttaatatgttatctgtagagcagttaaggggaactatatcttgtgattgggttttttgtgtgtgtgtgattctggggcaataggcaaacagctagctatgaggaaggggttagagagcaaactgacctaatgatgaatgttgagtgtgctgtaagtgtggctgattttagtttgtccccctcccttcttctctgattaatattataaagttttcagggatggtttcagccctccctgaccatgctggctaaagtggcttgccatcgtccttaatatttcacccagtagcttgctgccacccccattataccaccctgtcttctttaaagcatcagaacatgaaattagtctctgtatgttttatttttgcctctcttcccccatgagggaagggctcactccagagtggggatactggattctactaatgtactttcatttgcgagtttgctgtcagcgctcggctgtaatctgacggtgtggatggaagaatcagagcaagtatgtggcaatgaacaacctgggttcaaatcctgtcccctctacacagggaagtgacttgtcccactgagtcttgttttttttttgtttgttttgagacagagtcttgctctgttacccaggttggagtacgatggcacaatcacagcttgctgctgcagccttgaactcccaggctcaagcgatcctcccacctcagcctcctgagtagctgggatgagtgcgcgccaccatgcgtggctattttctttctttctttctttcttttttttttttgagacggagttttactctgtcgccaggctggagtgcagtggcgcaatctcggctcactgcaacctccacttcccaggttcaagcgattttcctgcctcagcctcccgagtagctgggactacaggtgcgtgccaccacgtccagctaattttttgtatttttagtagagacagggtttcacc[139 bp omitted]ttgtccaggctggtggtcttctcatctataagttgaaaacacagtccttgtggggttgcttgagacacccagaggggcttcaatgcccctggtgactcagaggctttcaatgaaagtcctgggctcagggagcagacaactcccagtttgagacttgattctgccgtgcacttgctggctgacctcagaggaactggtcctctctatgccccagtttcctcacctgtaaaatggggataggggtatggtttgagatgatgatatccctcctccattgggtgcacagtccacatcaggcacagaatgcaccatgctcttcaccttccagctcacagaatcctcaccacagctgaaggatcacatggaagttttatcatccccatacagatggcaaaagttacacaccctgaaagtcaatggcacagccagccacccagcctagccccaggcatgggactctgttgcctggtcatgcatgggtgtgtgtaattttcttttatctccacaactcaattgatttctcctttctcgataggtccaatgatgaaacttaagagacattttgtagcccagaaatacaaaaaacaaattgatcacatgtaccactgactgctttgatggagctgctctcagctgttctgatggtgagattcagttgcttggctttgctgggctatgcattcagagtccaagagagggctccactgtgtggcaggcagatctgtgactggaactgcagaaaacacacacatacacacatacatacacacacacacacacacacacacacacacacacacacactcttagttgcagtggattctgagtagcaggcttcaactcatgctgtctctactctaccagggtcatggtagggtgtgtaaactccttcagctggccaccaatgttgttagctgtgcttcctgccttttctatttgtttctagaaagtaggaggcaatgaatcccaaatgtctcattgggtcttatttggagaaggcctttgtcagaaactttagtggagaaagttctacttgccaggaactcaaggaatgaggtgtgttggcccattacacagataataagggatggaggcttgaacttccactatccaccgtttatcctctcttttccccaagacatgtgcagagggagcctccatgacaccatgaatcactgatagttattgaggtgttttttttttttttcttcactagatgcacagtgcaggcagaaagtagaatgcatcttcaattgtcctataggctgcctgtaaccttttcatgggcaacttgttctaatgccaccagccaacccatgttttagtttgctggggctacattacaaagtaccacagactggagggcttaaacaacataaacttattgtctcacagatctggaggctaaaagtgtgagattgagaggctggctggcttggttccttctgagggctgtgaggggaggatccattccagacttctctccttggcttgctgatggctgtcttctctctctgtcttcacatcatcttccctctgggtgtcactgtgttcaaatttcccttttatagggacaggttagtaagattagggcccacccttatgacctcgttttaacttctataatgatctagtttccaaataagttacaccctgaagtactaaaggttaggacttcaacatgtgaattgtggagggatacaactcagcttgtaactcatcatatccattgtcctttgttcaacgttaactggtttaacccttccacaccttcatttgttgatgtcttgtgggtgggcccagcagttcaacgtaccacattcataattcttcatctttcacaagatttccaatttcactttccagttgaatgagaaaccattggacattgatgtgggagtgagagatggaccctcttacaccagtgctgtccaatatggcagccactggccactatgtggtctgtccaaaccaagatgtgctgtaatacataaaacacactgggcttcaaaagcacagcaccaaaaaaaaaaaaaaaaaaaaaaaaatagaatatacaatatctcatcagtattttaaaattttgattacatgttgagatgatattttggaataccgggttacgtaaaatatttattattaaaagtaattttaccagttttaaatttttatttactttttagagacagggtcttgctctgttgctcaggctagagtgcagtggtgcattcatacctaatgttttaaatgtttttgtagagatgaggtatttctatgttgcccaggttggtctcaaactcctggcctcaagcgatcctcctgcttcagcttcacaaagtgctgtgattacaagtgtgagccactgtgcctggccaagttccttttttaaaaatgtagctgctatacattgttaaattgcataggtggctccagtaatgtttcttgtggatagtgccactctaaagttcattgtggggagattttgggtgacagccaatttataaatggatcgattcactcgggaatattttcatcatatggtgactgtgggatcttggagactgaatgcacatattacgagaatccccatgtgataacttgtgtttctcctctttgcagccttcagcaggaagacctcattgcaataagtgaaatgctgctctaggtagaagctctccctgctgtttttaagaagccacattcctcattggtcagtttcttgattgttcgtctgttggagaggtgctccctagaagaacctgccatacgtttcaaagcaataaaatcactgtatatctttctaaggaccttcaagtcatgactccagggaagcctattgggaagtctactaaaaactgcctgatttacaagaaagacctgaacttgtgggctcccatttgatttttttctcctcaggggactcagacattagaaagaaaaagcctcacagatttgaagaactggacccccaaatcaactcacctgcctggaagcaactgggaaacccttccaataagtcctgataataaagcacttcagggtcccatgtcttgatttttggcttgatagaaatactttgtcctttatttagtgtgatggggagggcttggactctgaaatcagttctgggttcaaattgtgaccagctgtgatttcaactgtctgaggctcggagattttaaacctggaaagtagatccccatctcggagggtggccatggaagttcatggagatgatgtacagggaatgcagtatctaactccagaaagtcctcggtttgagttaatggttatcatcaacacagtcactcttggttaactcaagagtcaaggtatgactcttgactaattccgtcattagggaggagttttctgttgtagtaagttaagtaaacttaaagaagatagtttattcctctcccatccaacagtcatattataagcagaccagagctgataaagcatattcatagtgtgtctccgaaatattagtagggagagtgggagagggaacatctcccagcctggacagaaacagcatatcaggagcaacaaaactcccagtgtctcttaagcttctagatactcagaggcaggccagagacccttttgagttccattttttaaatacaccagaaatttaaaatgacattctccttgcaaaaaaaaaaaattaatgcaatgccgataaggctaatgtcatatttgattgctgtactaggccattattgcactgttataaagaaatacctgagatggggtcatttataaagaaaagaggtttaattaattagctcatggttctacaggctttatagaaagtatggtgctggtgcctgttcagcttctggtgaagcctcagggagctcacaatcatagcggagggcaaaaggggagcaggcatgtcgcatggcgaaagcagttgcaagccagagggagtgccacacatttttaaatgaccagatcttttgagaacacactatcgtgaagacagccccaagccatgagggatccgcccccctgccatgacccaaacacctccaccaggccccacctccagcacaggggattacagtgcaacatgagatttgggcagggacaaatatccaaaccacatcaatggccctcctcaactatttggcgggcttttactttttaatgagttagtacagttggtcctcactatctgccaattccatatttgcaaatttgcctcatcgctagaatttgcttgtaaaccccaaatcaatagttatggcactttagaggtcattccaggacatacacaggagtgaaaaatttgagtggccaactgtacattcccagctgaggttgaacaaggcaacactctggcttcctgtttcagctctcacactgtaaacagtgccctttctgaggtatatctcatgccacattttctgcattttcatgtttctgttagtaaacctttttgagttttttaaaaatagagacagggcctcactctgtcacccaggctggagtgcactggtgtgatctcagctcactgtaacttcaaattcctgggctcaagggatcctctcctgtcttggcctcccaaagcactggggttacaggtatgagccactgaactcagccaaacccttctaattttatccatgactacactgtacaatttttggtcaatataattctattttatagtttttgtttctactgtccatgtgatctccccacttgtaggttttctaggtagttaatgttggtatatggaagtgctgttgatttttgtatgttaatattatatctagacacctcactgctaacctatttctcaaaatgtgtaagctttttacagagatgtgcatatcttttgcaaatatttttttacttccttttcaatattgattcctcatcaaggaaatacaaatggttgatcatgtcaagtgagggaagctcgaatacaggagaggaatgtatgtattttctataatgattctcaccctggtctcactgttctcttaatgttctctcaatgttttttgagaaacgacaagaatctactaatgtcaggaaggcttttaaaatttaactgtggtaaaatatatgtaacataaaatgtgtcattttaacccttttttagtacacagttcggtggcattaagcacattcacattgttgtacaaccatcaacacgacgcatttctagaagtttcatctcttcaaactgaaactttatatccatcaaacaattccccatttccccttcccctgaaagctatcattctattttctgtctcttgaattttactactttaagcaccttaaaagtgaaattgtcggccgggcatggtggctcatgcctgtaatcccagcactctgagaagccgaggcgggtggatcatgaggtcaggagttcgagaccagcccagccaatacggcgaaaccccgtctctacaaaaaatacaaaaattagctgggcgtggtggtgcatgcctgtagtcccagctgctcaggaggctgaggcagaacaatcacttgaacctgggaggtggaggttgcagtgagctgagatcatgccactgcactccagcctcgggaacagagcaagactccatctcaaaaaaaaaaaaaaaaagtgataatgtaagaatatttgccattttctgactggcttatttaactgaggataatgtcttcaagggtcatccttttttaaagttttttcaatttttttaacaattttttaaaaatagagacagggtctccctatgttgcccaggctggtcttgaactcctggcctcaactgatcctcccatctcagcccctcaaagtgttgggatcacaggtgtgagccaccacacctggcctcatccatgtttagcatgtgttaaaatttcttttttcaggctgaatatttcatcatgtatgtacacatgtgtgtgtgtgtatgtacacatatatacgtggataaatttatccattcatccatcaatagacacttgggttgcttccaccttttggctcttgtgaatcatgcttctatgtatatgggtccatggcatggttcagggtccatggcaaaaacgcactcaacgcccagaaaagaaaccatgggtgtataaatatctcttcacgcccctgctttcaattatgcttggtgggcaaatgaattcataaacccccaggcacagtgactcaaagtccttctctaactcaaccttctgggagcccagggctctgcttccttgacctcgatgatgcccacaccttatttacctcctccatctcaccactcttcttccagctcccttgggaactctctcactcaacctcaacaatgtagaacagtgactctggaatccctcctgctgccagacttgcccctggctcctccctggggactgtcaccttgcagaccactggcttgtcagggcagtgaagggccttcttgggtagaccctccctgcccgctaaaactggcctctacaaagaggcaatgggccatgtccccatcatggctctgggccacgggatacacagtgatggcaccaggctggccatggacaggaacattctggatgtctggtctagggaccactgtccccctgtggctagaacggggggagtgatcaagctgataaaaaggtagagtccagaggccgggcatggtggctcatgcctttaatcccagcactttaggaggctgaggtgggtggatcacgaggtcaggaggttgagaccatcctggctaacacggtgaaaccctgtctctactaaaaatacaaaaaattagccgggcatggtggcgggcgcttgtagtcccagctacttgggaggctgagg[132 bp omitted]tggctcatgcctgtaatcccagcactttgggaggctgaggcgggtggatcacgaggtcaggaggttgacaccatcctggctaacacagtgaaaccccatctctactaaaaatacaaaaaattagccgggcatggtggcgggcgcctgtagtcccagctactcgggaggctgaggcaggagaatggagtgaacccg[149 bp omitted]tgaaaatatgttgtggatgggagggagggactgggagcccacatacctcagctcctcctggggatgaactaggctgcacaccaggtggggaatgtgtgtggtaggttcatttccttctatgctcctccttctcttcactccagcccccaacccccccctttttttttttttttttttttttttttttttggagacagagtctccctctgttccccaggctggagtacagaggtgcgatctctgttcactgcaacctccacctcccaggctgaaatgattctcctgcctcagcctcccgagtagctgggattacaggtgcccgacacgatgcctggctaatttttgtatttttagtagagatggggtttcaccacgttggccaggcctcaagtgatccgcccaccttggcctcccaaagtgctgagattacaggcatgagccaccgcacccagcctgttatctctctttttttttttttttttttgagatggagtctcactatgtcacccaggctggagtacagtgccgcgatctcggctcactgcaacctccgcctcctgggttcaagcaattctcctgcttcagcctccagagtagctgggactccaagtgcgcgccaccacgcccggctaatttttgcattttttagtagagacggttt[132 bp omitted]cctcctttgcctggtcagtgtctacccattgttcagagaagccttccctggccacccccataactcggtgggaatcctgtgcctccctgctggaccctcccacccctgctgcccactgtaatttcgtttgaagatctgtctgcccaagcccagcaaactagatgcccccagacagtgacaaggaaaacaaagatactttgaagaccatgtcctcggacagattcagagtccacgacagaaaggcactcaacacccaggaaagaaaaacagagtttggggctccttggctcctgggtgagggtagtggtgttcccagagaagccagtttgagagtggggatctagcgcttcagggctggccaaggccgttcagccagtgttgggatcctttagggttcaatctatctcttcagaagttgcctgatgggatgcgggcatggagagcaccaccatagggtgcccggctgggtgtatgggggtttgggggtgcagg[132 bp omitted]tgaaaccccgtctctactaaaaatacaaaattagctgggtgtgggggcgcatgcctgtaatcccaggtacttgggaggctgaggcagaagaatcgcttaaacccaggaggcagagttcgcagtgagctgagatcatgccattgcactccagcctgagaaacaagagtgaaactccatctcaaaaaagaaaaaaaaaaaaaaaaagaagtgtctggtccctggggaggagacggcgcccggcagggacagtgggcctacagctgacctgtctgcttgctggtgggtttcctgctgaactcctctctgggtcagtgcgtctcactgtccacctgtccctgcatccccttctgtgcctcgctggtcatctttctcccttggcaatccacttcatacaccacgcctcctccgtctgccatctctcagtgccacgctcctgcctgtgctcccatctctccctggttttgcccctgacacgccacctgctcgcctctctctaggtccatctgggggtctccggccgccgctgacccgcctgtccgcaggctgagctactcggaccacggagcgcgacggggaggcgcgactgcggctcagcaaggactaagttagcaacaagacactcctcactgtgcacgacatggtcgcgagcacggccatcaagtacgccaacaacatcgcgcccggctccaacagctgccacctgctcacctacatcgagtaccaccagcagtgtctcggcgtcgagaagtctttcttcaaagtaccgccaggcggtccgcgcctgcgcgcccctcccgcccctcctgcgcctgcgcgcctcttctgcacccaccctcttgcgcctgcgcgccacttatttcacctcctgcgccagcgcagcgctccagggcctttcttcccccgcccctccccgcgtcctgcgcctgcgcgcctttcttcccccggtaagcctgcgcgccgctccggcccacttgcttctgcgcctgcgcgccgctgcagggccttcctcccccatctccccccgcctcctacgcctgcgcgccactacatcccttctgcgcctgcgcagtgttactctcctgtgactgccacttgtctgactcgcatgtttgttttaacggattccctgaggctgcctgagagccagaaatgaaaagctgcagacttaggggccctggttcagatcccagagcagccattagctacgttttcttgcacgaaaactttgtgcctttgtgcctctgtttccctatatgaaaactttacatataaatatatatatatatataaaggccaggcgcggtggctcacgccttaatcctagcactttgggtgtccgaggcaggcagatcacttgaggtcaggagttcgagaccagcctggccaacatggtgaaaccctgtctttacgaaaaatacaaaaattagccaggcatggtggtgcatgcctgtaatcccagctacttgggaggctggaggcaggagaatcactccaacccgggaggcagaggcagtgagcccagatggtgccactgcactccagcctgggcaacagcagagcaagactgtctcaaaaaaaaaaaaaaaaagaaaagtcattccaatacccatagtaaactggatcctccggtaaaaataaagttaaaaaaataaaaaagtaaacatataaaaatatgtattattatatatacatttaaagtatagtttttataaatgtacagtatataaaacgtctgtttatggataaattttatgcgtgctacacttttatttatttatttatttatttttga[134 bp omitted]cacgcccggctaattttttgtatttttggtagagacagggttcaccgtgtcagccaggatggtctcgatctcctgaccttgtgatccgccctccttggcctcccaaagtgctgggattacaggtgtgagccaccgtgcccggcccttttatgttaaatttaatataaaatattttcttttatatcagcatttttatgtaaatatataaaatataacagcagctagctcacagctttgctgcatggattcagtgagtttacacacatcgaatagctctggcacacacaaagcattgcaccagcattcactatttattatttttatggttttgtttgtttgagacggagtcttgctctgtcactcaggctggagtgcagtggcccaatcttggctcactgcaagctccgcctcccgggttcacgccattctcctgcctc[212 bp omitted]cagtctctcactgtcgccagggctggagtgcagtggtgcgatcttggctcactgcaacctccgcctcccgggttcaagcaattctcctgcctcagtctcctgagtagctggggttacaggtgcctgccaccacatccagctaattttttgtatttttagtaaagacgggggtttcaccatgttggccaggctggtctcaaactcctgacctcgtgattcacccacctcggcctcccaaagtgctgagattacaggcatgagccactgtgcctggccattattatggtttttactgtgtctcttctccagtggcatttcctcagcgaggtctttccttgctaccctggttccccgaacctgccctctt[137 bp omitted]acatggtgaaaccctgtctctattaaacatacaaaaaaaattagccaggcatggtggcacacctgtaatcccagctactgggaggtggaggttgtagtgagccgagatcatgccactgcactccagcctgggcgacagagcaagactctgtcacaaaaaaatattcttcccagttttcatcatcatggctacaagttaccaaggtcatttgtttatttggtcatttccttgagggcgagaggccagattgccttgttgttgtaccagcgccaaccctctgatgtttgttgaattaatgaacacccatttttcagatcaggaaaggggataagagacctcctgtgacttgttctgtcaatgtaataaacaagtaaattatgcaataggtaagacagtgttcagtgattcagaggaatccaaagcacgtaaaggagtaaactgttgaggtgggggcagaatttaaaagtatggcggctagccaggtgcagtgcctcacacctgtaatcccagcactttgggaggcag[134 bp omitted]gaggcagaagaatcacttgaacccgggagccagaggttgcagtgagccgagatcacgccactgcactccagcctgggcaacagagtgagactctgtctcaaaaaaaaaagaaagaaagaaagaaaaaggtggctaaggagagcctcactgagagaaagtgatatttcaacaaagacttcaatgaagagaaaagatctatgggatggtgttccaggtcaaggggagtttgtgcaaaggccctgaggcaggacagtgcctgctgtgttgaaggagcagtgaggaggaggcccctgtggctggagcagagtgagggagggagggggtggggaaggttgagaagtgcctggtgggccttgtgggggacttggcttttacccgaggggagggggagtgggagccatggaggcagaggagggatatgccctgactcaggtgctcacggcgctctctggctactgtggggaggacagactgaggggaaagagaccagctgagattgagatgatgatagtttggaccaagatgtagcaggagagagggtgagaagcgttcggattctgaaagcagagcccacagaatttgttggtgtctcagcaaaacccgctgagaatgaccaaagttttctggtcagtgccacttgaaggatggagctgctgttgtctgagattatggtaggttggagtggagggaggagatttagggatgagggctgtgggtaacatccctcccctagctgggctgtttgggtttgagatgcgtgttagacgaggaaatgaggggtgggcagttgtatccaagagtctggagtggtggggaggggctccacctggatccgatggactcacctgagtgaatggaaccaagagagttacaccatcttaaattgtcaagtcgatccatatgtcggcacagataatcacagtgcataggcaaagcttgagctaccagggcgttcgccccaacattttatctaataaaagtgaaaccaggctgggcatggtggcttataccagcctggacaacatagtgagaccgccatctctaaaaaatatgaaaattagccgggcgtggtggtgcatgtgtagtcccaactactcagaagcctgaggcaggaggattgcttaagccaaggaggtcgaggctgccatgagccatgaacgcaccattgcactccagccttgggtgacagagcaagaccttgtctctcttttttttttttgagatggagtcacgctctgtcacccaggctggagtgcagtggtgcgcggtctcggctcactgcaagctccgcctcccgggttcacgccattctcctgcttcagcctcccgagtagctgggactacagacacctgccaccacgcccggctaattttttgtatttttcatagagatggggtttcaccgtgt[133 bp omitted]acaacaacaaaaaaacccagcagccagagcctacataagtatcagccaatacgggggatgattaaatcatgtcatctctatactagatgatattatgttagatttgatattgcagagaaatatttaaagactggggaaaacagtcaagatgaatggttttgtgaacaaaggcaggtcttgataacgtacatgtagtattgccctggctctgtaaagtatgcatgcttaaaaatgtcaggaaggtattttgtttgtatttttttttttttttccgggatttctcaatctcagggccgttgtccttaggggccgaatcattctttgtggtggagaatgtcctgtgagtatctagtttccatcaatgccagtggcgtttcattccccgagctatgacaaccccaaatgtctccaagtatttccaaatgtcccctgaggaacagagtcaccccctggctgagagccccagttctagatgaaagtgtggttgcttgtcatgagggggatgggttattttatcagagaaaacaacagaagaaacaggacaagagaggtgtctgtaatcccagtgctttgggaggccaaggcgagtggatcgcttgaacccaggagtacaagaccagcctgggtgacatagtgagatcccatctctacaaaaaaattaaaaattaaaaaattagccaggggtggtggtgtacacctgtagtcccagctacttgggggactgaggcgggaggattgctggggctgggggaggttgagactgcagtgagccatgattgcgctattgcattccagcctgggcaacagagcaagaccttgtttcagaaaaaaaaaaaaaaaaaaaaaaagaagaagaagaaagaaaaagaagaaacaggcgacagagaaaagggagccaaaggttctcagcctgaggctcccgggcaggtggggcggggatggctgagcctcctagtgcctcacgaggacctccctcccctagctgggcctggagcgcttccacagcgtgggaatcatgggtctcaactcagaagagtgggtcatcgccagcattggtgccatcatggcagggtaaagggcacgcggcctctccccggagtgttttgcgggcaggaagccaccagcccaccttctatgggatcccaaggaagagtcctcaggacagggagctgacaagagctcccacttaagtctacgcttagtgggatttttcaatggcccagtcctgagcatgctcagctcacctttccagacagtctctatctagtgaactcatatacatcctgtgaatccccgcattcatgtcccctcttccagaaagccctccccacttcttgaggctctccagcactgagccctctctccacccatccagaacattggggaaccccttgagagcaagatccaagcctgaactgtccctgaattccacctcccaacagggtatgttgtgagtgtcaggtactggggattcccaggaaccttgcactcacccagcagggagtagctgggattacaggcatgcgccaccagatccggctaattttttttgcatttttagtagagacagggtatcatcatgttgtccaggctggtctcgaactcctggcctcaagtgatccgcccgcttcagcctcccaaagtgctaggattacaggcatgagccaccacgcctggctgatatcaattttaaataataatatgctaagagctctaatggaaaaagcagacagaacttacaacaggtgggttcttgtaagcagagatggaaactctaagaaatcaaaaggaaatgttggtcatcaaaaacactgacataaaaaaagcatgcttccaatgggctcggcagtggactgaatacagccaaggaaatcttgagtgagcctgaagctaggtcaatagaaacatcccatgctgaaaatcttaaagaaaaaaagaggccaggcacggtggctcatgcctatagtcccagcactttaggaggctgagtggggaggactgcctgagcccaggcactcaaggccagcctgagaaacttagcaagaccttgcctctatttaaaaaaaaaaaattaattaagaagaaaaaagaaaagacaaaaacacaatgaaatgaaatgaacaaatggaaaagaaccgcgggacaatacagaaagtgtaacatacacataatgagagttggttacagatctgaggccgaggccggtggatcacctgaggtcaggagtttgagaccagcctggccaacatggtgaaaccctgtctctactgaaaatacaaaaatagccaggcatggtggcagacacctgtaatcccagctacttgggaggctgaggcaagagagtcacctgaacctgggaggcggaggatgcagtgagccgagaccgcacgactgcactccagcctgggcaacaagagcgaaactccatgtgaaaaaaaagagaaagaaagaaaaaagaaaaaatcactgagaattctccaggaactcacaagtatcaacaaggagacgtttaaaaaaaattaaggccaggtgcagtggctcactcctgtaatcccagcactttgggaggccaaggtgggaggatcgcttgagcccagaagttcaacaccagcctgggcaacatatcgagacctcatctttacaaaaattaaaaaacaaacaaacaaaattagctgagcctgatggcatgtgcttgtggccccagctactctggaagccatcgtgggaggattgcttgagcctgggagggtgaggctgcagtgagccgtgatagcgccaccccatgccag[143 bp omitted]atggtgaaagcccctctctaaaaaaatacaaaaattagtcgggcatgatggcgggtgcctgtaatcccagatatttgggaggctgaagtggcagaatcacttgaatccagaaggcagaggttgtagtgagccaagattgtgccattacactccagcctgggtgacagagcgagactccgtctaaaacaaaaacaaattaaaattaaaacgtcagaacaacagataaaaatattctgaaacataagcggattcatttatatgaagaaaaaagcatgcaagaatatctgggaaaattctgaagcagaattataaagggaaactaccactaccagactttttttttttttcagacggagtttcactcttgttgcccaggctggagtgcaatggcttgatctcggctcaacgcaacctccacctcccgggttcaagcgattctcctacctcagcctcccgagtagctgggattacaggtatgcgccaccacacccggctaattttgtatttttagtagagacagggtttctccatattggtcaggctggtctcgaactcccgacctcaggtgatctgcccgcctcggcctcccaaagtgctgggagtacaggcgtgagccactgcgtccgggcacactaccagatattaattaggtcacacagtggcagaaatgtaaaggtgagtactgtgcatatgagggaagccagagagagacacaaacgtatgcaggaattgaaaaatgcaaccaaagacggcatctcaaataagtgaagacaggttattcaataaatggggtggatcgccttgcatagctattggggaaatagagctggggccctacctcatggctgaataaattccagatggaacaaattgaaatgtgagaaagaaagagggaagggaggcaggaaaagggggaagaagaattgaattcctaggagaaatcatgggagaacttaaaataaaaacatcctaaataataaacaataacagcccaaaaaccatttcaaggaaaacttgatcacttgataatggatcacttgaggataggagttccagaccagcctgggtgagagtgatagtccatctcaaaaaaaaaaaaagaaagaaaaagagccaagcgcagtggcttacgcctgtaatcccaacactttgggaggccgaggtgggtggatcatgaggtcaggagttcaagaccagcctggccaagatggcgaaaccccgtctctacccaaaatacaaaaattaccagggtgtggtggtgagctcgtgtaatcccagctactcaggaggctgaggcaggagaatggattgaacccgggaggcggaggttgtggtcagctgagctcgcaccactacactccagcctgggtgacagagcgagactccatctcaaaaaagttaaaattaaaaattagaaaaaatcctgggcaactcggcttgctgaggcagtttctttatctgtagacagggatgaagcagtgcccacctcacggagtgcttgtgaagagtccatgagacaactcttagggaaagcctgactacattttttttttttttgagttggagtttcgctcttgttgcccaggctggagtgcaatggtgtgatcttggctcaccgcaacctctgcctcctgggttcaagcaattctcctgcctcagcctcccgagtagctgggattataggtgcctgccagcacgcccagctaatttttcctatttttagtagagacagccttcaccatgttggttaggctggtctcaaactcctgacttcaggtgatccacccgccttggcctcccaaagtgctgggattagaggcgtgagccacctcgcccagattttttttctttttttttagtacagggtctctcctgtcgcccaggctggagtgcagtgcagtggtgcaatctcggctcactgcaacctctgcctcctgggttcaagagattcttgtgactcagcctcccaagtagctgggtctacaggtgtgcactgtactttaggctaatttttgtgtttttactagagacagggtttcgccatgttgcccaggctggtcttgaactcctggcctcaaatgatccacccgcctcggcctcctaaagtgctgggattataggtgtgagccaccatgcctggccagaaagccctaccacgtttttacacatccatagtccttccactgcaccttggagggtctgggaaccctgaaggaaccactgtagaccttctttcactccatattcttactttaggagctcagacccaaaaccataccccgaaggcctaaaagaacctttctctggtaaggcacggggcagggaaagccacactctgatgctgggaatggatcttttggttccagagtagaagggagaagacatgctccagagtccccagcgctaagctgagcccagctgagtccccagctgctgcctgctgacaaaagtgatctcaatcagtggctgccacggtgatcctgtaatgtgggctgctcaggaatggaactcctgctcctctgggtggagctggagctggagcacagaggggacagatctgctcaaatggggccagtgacagctttgtctcctggaggttcactgagctctgccacactgaggccagagaaaaacccaccagagggaaactgggagatggcacgctggctcctgggaaaaaatgtctttgcctacatttttatttccgtccatccaaccatccatccatccatccatccatccatccatccatccatccatccacgcatccatccttccttccttccatccacccattaacccatccattgatccacccatccattcattcttccatccactcacccatctatccatccttcctaccatccatcctttccatccatccacccatctgcccttccttccctccttccgtccttccctccctcctttcctcctttccttccttccttccatccacccatcgatccatccatccttccatcctttcttccacccacccacccatctattcatccatggtccacccaaccaatcatccactcatccatcaaaccacccatccactcacccacccatctgttcatccatcatccatgcatccaccttatgaaaccaagttttcttctcaacccaaaccttgctgtctgcttccaagtagagagcacagcatcagaagcaggatgtgagccgaattctctgccctcttgaattgctggtagcatcgtctccagccttgctcacactccccacccccaccaggcttggtcccaaccctccttctctgttttggtcactgatctgggggcactgggacacgtagtcggggcagggggccccaggctacctcgcaagcctgcccactgactggacaggaggaaccaggcagatgcatgcgtctgctttcccatctgactttatttcactttttttttctataaaactcctccataatttcacaatttaacaaaagtttaaaatccaggaaagaaacaatcctgtaactcgttacaaacacgattctccttattccttttatccaggagttggtctcgggccgatgagtgtcctagttcctagtgagacacgttctttgtaaaaacccttatgggcaagaaaggtattcgataccatttgctttccggcgtcggtttacatttttgttcaggagagagcaaaacacagagatttgcactgggggcaggcggcttaacaggaaacacgtggcaatcacaaagtgccaggcccctttcctatggaagtgtccccagagccctcgtgggcccagccgccgggcagctggggtggggtgggagagcagctggggatgctgccttgggagcccatgctgcccagcacgtccatcaggtggtcacggagccagccctgggcccagagcagctctggaggacaacgtgaggccttccggccagaggaggtaactgagaactgggttggtgcttccggaggccttggaaacggcaggaagggccagacgccaccaccgagagcaggcgggggagcccgaccctcctctggctgagtggaaggctgctcgagtcgctgtgtggattttgggggactcctgcgaaggagaaaggccagcaccctgggctgaggttcctgtccgtgaccccggcggcctcttgtgcgtagagctcccagcagcacgggcccccggtcagcccccctcaggccagttccttcagtccaatgtcttagtttccagagaagaaaggaagcgccccatggtggagtattgttggccgccctgggaaggggagagggggcacaggggcctgccctcttcctgatacctgaaggcagtggggccgggagagaaacagagcaggtggcgaggagtcccggaggcttcctccgaaggttctcgggcctttccccgagagttctggggagtttccccaggacagctggcattgggggcagccttggaggcatgggtccccaccaaggagtgttcaggatctgctgacagaatcagagcagggacaagatgagggacctcagggagggacagatggagccccccaagtctgaactcataggctggggaggaggagacatctaggtgggttcgagggggtgcgagcccacctccaggccctcagccctcttttcctcataacttggtcagggcacaaggacttgaaaggacttgaaagtcagggggttgagaggactggaggcgcctcgagtcaatgtctgggaaacagaggctaaccaggcaggcctccagcccctgggacccccagccacgatgggctggctccgcgggagcgtcctggccctggaagagtgggccgggaaggaggaccggcttggcccctggagaatctcaggcataccaggagtggggctgcgggcgcggcaccagcatgaattgcggcggtggaggccggggcgggccaggccgcgaccagagagaaaggcagcctgggagggccagcccggccaacccaccgggcctgctgatggccgagcccacgctcgaggggctgaccagagttcaatgcgcctcagaaaactccataaactatcccgtcttatttggcaaaagctcatatttttttcaaagtttgaagacttgaatgaaagagaggaagaggagcctatgggaggaggccgagccccagggcggctgatgcgagtctgtccgcggagactgttggcgctagtctgagtagagcccgagagcagactggtggctcccgggcgccctgaggactcgctgccctttgtagtgttggctgacccccccgggagccccggtaggaggcggcggcatccttggaacggcaaagggagaattcctccatgcgcctggagagggccagctgccgtgcctggctcggcctccagccccacaccaccgcagagacatcttaacctacaagccccaccgtacgcaccccccacccaccccacgtgcactgctgccacagaaacgcacatggacactgctcttgaccagacagtgcacacacatatataatagagagaactatacagcacagaccccagcgcagcgcgagccggggaggagccggcgctaggtctacacggaggacgacgcagacacacaggcagggccttctgaggtccagggtgggcggagggtgtgttctgaaccattcgggaggctggagatgccccccagccgtcgatccgctgctcagaaaggctggggcagcgacgccgcacagcccgccgagcagtgggggctggtcccaaggctgggcgaggggcccccggccctgtctctgcccagagctgccttcaacaccagccgctctctgaggggagcccagagagcccggggggcggctcccgtgtggcccagcccggccccagggctcctggcgatggagcggggagagtgggcagggagccgccgaggaaagtgcagcgggctgtgcgggcgaggacagggctgtcgctaaggcagtgctgcgggcaggcgagacgggagaggagggcaggcgaggcctggctgcagcctcccaggaccccggcggtgggggcccggcacgcggcccagggtcatgtggccacggcctccaggcagctctgcagtttgcgcacggtggtctcgtccagggagaagaggtcgaagtcgaaggtggtgttggtgacattgaagtggccagtctcctcgatcagattcacaatctgtaaggtggtggcaggtggcttcaggggcagggggccaagggtggggttgccctgttccctaacagaggtaggggctcctggggcagcaccaggggcccccgcagcccacactcctcacaggcaccccgacctctgccgggcaggaccctcaggggggcgatacctgctgcagcacgttgcgctcccgcagcgccatcagcctccggtgtagctccaccagctcatccgtgtaggcctggggagggggggcaggtctcagcagcgtgtgggggccctggacccttcctgctcccatgcccagccccacccatgacccagtccatcccagcacaggacagaggtagccacatccaaaccaaggaaggcccaaggctgcaggggcagcccctcagctccaaggccacaccgggaggggaggaaggactgtccctgctcctgcccaggaagagtccaactgtggggtgttggggggctctggggtcctccactggctgcaactcccaccacccacccctccgtagcctccccgccttgtcgtaggtgcccccccaccttgtcgtaggtgcccttcttgaggatcttctcaggcttgctgcaggactcggggctcctccggcctgacacctgcagggaacccaggtctctgctgagctgtggcccacaccctccccagccccgaaggccccacaaaccctcctaggacagcccggcccagggctaagcccggcctctggtgcaccccctgcctgcaggccccaggctcaccttgctgttgggcgggggtggcttctgggggggtgggggctcacggctgggcagggaggagtcggcgctgttgtcactctcgctgtcgctgaagctcaacctgaaccgacacacgggggcgcatcaggcccctgccgccaccacggcccccaccccacccccaggctcaagcctctgccccgcacggagtcggtgcctgagcccacacacccccaacagctccattcacctctgcgcaggaacctcaacttaaaaatactgtgtgtggccaccaagaggaaagaaccccaaggaaaccaggccacccagaggccctttgggggccgcccgagcaggccaagagtgctccgggatacccgggacacaaagccccccagccaatgggccttgctgggctgtggtcctctgacttggttctgtggctttaacaaggggaggaggagctgcctgctgaaaacctgccctcttctcccagcactgccctagggcttccatggccgcccgtccctccgatgctcccctggccgcctgaccctggtttgctctggacagcaggcctccatcagtcacatcggcccccctgaccctagagggtgtggtcctaaacaggggtatctggtggtggggagaggtccaagctctcaacctcccctaccctggggggcaggtctttgacctctgcctcagtttccccatctgtgaaaggaggctgctatgaccacacacagagcctgggcccatttttctctcactctgcgtgcctggggtcccgctctgccagggatattttgggcttgatccagtgagaggggcccctgacaaccatcacttcacaacacgtttaaaacacagcaaaccccaggcctcctagtgaacaaggaggtgccagaagcggctcgagcacaccggacttcccggtgggcagcacagccattgtccctgttcctggcctgctcctgccccggcgcaggctccgttcatctcttaaacttgcccctcagtggcctcaggctggggccactctctgcagctgcctcccggctctggcagctccaggtctggctcacgttgcccaggcgacgcccctgcctgtgctcctgccggcctctgccccgcatcccacaggtgactgggatgacggctgggcaccgctgcagactgggcttcccaggcagcagaccagggtgtgcagaagctccgacggtgtggcctgggcgctccctgccccggcaacgcagggacaaggccggcaagccctcacccagggcccacacaaacgttccgggaggaatcaaaaggcgcttcgcgtgtggctcggtccctgtgccgtgcctgccagcccctctagaaccgaaccttccgtcagcctctctgcgctcacggctcttggcgcaagcagaatccaccctgaatgtcaccgaacgaggcgggagcctgcttccaggtcctgtcccagggacgccacagccctcctcgtgtctagagtctaagtccctgtcggagtcgtgggcccggacctcccaccagcggctcccccgcagtgagccactgctcctgctctgtctgcggtgggtgggaatcccgccatgtgcctgctggcctggcgcgctgcacacggggaaccaagcagaacctgctgcccagcttgcgtgaaggtggctttagtgaacaacacacctgcaggcgtctgtgaggctcccatgcaccttgctgggtgcagggtgataaccagccctgtctccagtaggagccactgaggcctggaggcctcagcctcacgggaggaggggctgactgccggctctgctacagctttggaaaagcctggacccccgcccgctgaagcctgtgtgcccggggccaaggccagcacgttctccactgtcgctgggttggaggccgagcgcatggagctctcccaggtggggtcacgccaagggtcctgcatatcccaaggatgtgcctcggcacccctgtgcctcctggggaaaaggccacaggcagccaaagctgctcccacactgggtgtccgctgccccaggacgggctctccatggatcctcgccccatgtaaggcaggtgggaaaggactgggagtctcctggcccaagagcagagaaacaggcctgctcccctccccccacctccagcctgggctccctcctgcacccctccctgccagatagcccacacctgccagtgaccacgaggagggatgccacccaaggccccagatgggggcagcccttgaggccctcagcctcagggaccaggagaggacacacagccccaggcccaccccaaggcccaggctggactggggccacctggggatggatccctgctttggccctcccaggggaccctccagtcccaaccccacctgcagccccacaatcactgcagacccagccggagtcgccccgggtggccgcctccgccccctggctcccaccgggccgtcacctggagtccctccccgggttggtcttgccggcagcctcctcgcctgacgaagagtcgtcctcgtcggactcctcggactgcaggtcctccaccatggagcgcaggggtcctggggaggcggggcagggagggaggggagacaagggcagggctccactgagcctccagggcccctcgcccatgaggccacgcagagcttcttgacactggtgacccccaaatgcacacgcccgtccacctgggggtccctgtgcccatctctaagaactgcccccacaccggcagccacccgcttcccctagaacgccctggctcccccacccctccctaccttcctggccctgctcgcaggcctcaggggactggccggcagtgggcgcgcagggcccctccattgctgcagccggaggagaacccctcctctgctcggggcacagagatcagaagctctgccgagagcccagggagggcgagggagccacagcctggctgggaagctgggcctggggtcacagatctctcttcctgcaccctacgccggcctgcccaccccctcggtaatcccctctgctgctcccagtccaccgtcctcccctttctccagaggcacacggttccagtcccctacagacggcatcttggtttatattcctgttaccaaggcaacagagggacacaaagccctcaattaccttagtcacatgatcccgcttcagtaggtccccctcccttcccggcagataagaacacttggagcgagtgtaggcttcaagggccccatcccccagccccctcggcaactgcacggctgaattccaggccagactccctccacaaccccgcacactcctctcccccagcccccctgcaaaggattccaggccaagggggaaggaggctcttgttccaatccaggagtggaaacgctttttgcctgggagtgggtgctggggtctggactggggccgggggctcagggcagctctcccactgtgtcctgcaggctgcctggtccccagggccctccccactctggggcaggctggtgcagccaatgggcctatgtcctttccccaaaaagccgcccctactcagggtggcctgcctggagagggagagggcactccaaacactccggcagcaggagaccccggccgtccacaggcagccagtgcctcgctggccctggggagcgggtgggatgggcggaggaggtgacgccgtccgtccatggtccccagcagcacagggagagttctggccatgggcagggccctcaccagaagcccctcaccagcctggctccaggcacggggtgcatgccaacagccaccacaaggaacagtgcccccgggcctgactggaggtctggtgacttgttcctgctttgcttttaaatatagactcccccaggccaccaaaaccctccatgtacagatctgcagggcccagcctgtgcaggcagtggacgctgaggaatgcccatgtggcctgagctccaggccctccccggccccatccgtgccccccagctgctctccatacacaccttggctgtggttctgggatggctcgaagtctgagtctgagctggagtctgagctggagctggagttggacgggcttgactgggcagacttcacccaatggtgggatgggcagggaggggagaaagggagagctgtcacctttcagcagagacaaagggggccccctggcagcagctacgctgagtgggtctcccccagacacccctagggtcccaagggtacccacgtgtgccgctgagaacccactaaggagccagcggccaggccatgcgcagcctatagcctcccgtgccagccctaggacacccgtggatgtctgggtttccggtagcgccaggagaccgtgtggaccacgtgggctctcctgtctacccaggcaggtgcacagggtactgggagggaggctggggcaggggcttgaagtcccacaggtgggtgggccttgccttcgtccaagagggcaggcattgactggtgtcgcaaaaatgtctggaacaggaaagctgggtgtggacacttcttgttctgacccagtgctgtccggggctcaggggtggcagagagctctgtatccccacccattcgctgctcctaccgccagctgcccaagacactgaagagcgtgcgtgcacaggggacagaagccatgggcaagcccggccccacccgcctcctcctcctgcagctgtccttccaggctcagccaccagggggcagtaaaagccacaacaaggacacaaggggtgggatgccaggacagagggtgacagtgcagggcaggcgtgtatggggcagaggcgtagctcctgggtggacgggaggcaggcactgcagacacctgcacggggaggggcccattgttctgggcccacatttctgccaatgagctcatcccaaggggtgtgccagaggacatggcgggcccagggcagccccctcaccttgggggcccgtctggtggaactaggtggcttgagcccctcagaccagtcccctccagggtcctccctccatcaggaggaggcagctggtctgctggattctggcaggggccgctgcagccgccagccatgcaagggaagccgtgaacggagtactgagctggtgggactcaggaccttgagtgcctgggagcccccggcccctcccctagcatgtggaggagacagcctccaccctgcagaagggtccccacgaaagcccaaggcctccccaagcagcaggtccagactcacccgtgcctgagagggaagagggacttcccaagggtttactgcagcccaacccagccccctcctgcccctcaaaccagcccctgccagcgccccttcccaccaacacatggcgctccctgatgaatcatcactgggaaagcctgccgtggtgcccatcagtcactgcccactcaggctacctgagtcccggacacataccccagagcgtccaggacccctggctgggcctgcctggagctgggtgatgcacagcctggacttctgttcttgggggccaggggtgagtaagaggtgaccgagagatggcctatttaaccccagccttctaaccagcaggccttgctactcagaacaaggccgtcctatgtcagcctcagttttcccagcaccgccagctgcctgcacaccgaggccaaggctagtcctcccttgacctccggatggaatccctggggcagaggggtgggcaccaacctggagggaggtggactggagaagtatccaaggtcctggccccatatcccatgcactttctcactaaaggtggagagggggcagttcaggcggccaaaggaggctgcacaaggtcagcagggatggaagcagagaggatgctgagccccgagaggcccccaagcctgtcctggcgccgtgccagacagaggaaagccagtcaggcacacgcatcccctttccttccgcccaaatccaaggggcagggaggaaaagaatccggaaatggtctcagccagaagagccctaaggtggtgtgatcagaagggccaccggagcacgcccggggctcagagggagggcggagcagactgggtccacgactgactccagatccccaagggccagggagaccccaaggcagcagctggaggacgtgggagctcggctcggggactcggcccaaagagtggccctacgagggtgggcgtgggccagaccccagctggtgcagattcttccgatggccggttctggtagcacagccacacacagcctctggggaggagcagcccaagacggccaaggggaagccaaggggccagtggtctggaaggccgatgtgcttcttcaccatagcagcctgggcttcggtgaagcccccgggggaagaggcgtcagggactctgtgctgttggggcctgggtctcactcccgcacagacctcggggcgctaagccgcattgctcaaaagcctctcagcacgcggggcgctcttcttcggccaggaggaagtcccaaagcctcctccagcaactccagcctcaaggccacccagccactctaagcagcggcgtccgaggtggcaggaagctccccacaaaatattccagctgtttcacaacactggtggcgggagccaggagccaactcactcactgccgggggccaggccgggtgagcagagcggagtggagcgggccgtggagctgccttgccgctgcccagcgtgctgcacacccagccccaggtaccagaagacctcgcctggagatgcctggcctgggactgcatgtcactcagtacctatccccaaccctggggtagaagggaggggacaagcgcctgcccagggctgtggttgctgcacaggcagagaaggggtcaggctcggtgcccagcaggcaccgccaggccctcccacagctgggagggctactgagatgggccgggacttctggaaggtggcaccggcccccccaccgcctcagggtcatagcagatggtgccgtcttcagccactgccaagccatgggagcaccgggcactcagccttgccagcccatgtgtctatgagccaggatgcactgttacccagaggctggaccgtcacccccagccagccccaccacctccatgagggccctgggggcaatgagcgctgcccacataaccccctcgggctttgtggctgggacctgcattcaaagccccagcggcttttcaaagcctcagcaacccagaggcaaagcttccttgagggcaagccggacccacaaaaggcccctgagggctggggctggcaacagaggtaaatggcccaaccctcatccatccattcattcatttttaccgggcccagtgtctgttgtctaaatgccaagtgccagataatagcgctggaagacaccaccgccgtcccaggccccaaacagggtctggccacaagaccatgaggtggctaccagctcttgcggctcaagtcatgtctgatgcagtcctctgagaatgtccggacgctgtgctgtgggacaagccagcagcctctcatggtgacaaggccggtccctgacaggggtcctcgttccaagctcagacactggtggggccagatgtgagtatccccaagtcacagctgtgtgcgatgggtgtgggcaggagggatgctcttgaccccaccagccacctaaatagggagccgggcacggacctgttgctcctcatggctaggggctgtctgaagccctcatcattaacctccagacaagggtgagtctcccagatgccctattggcagagctccaggccgggctgaccacgccatggtcagagcaaccatgagacacgcttgcccactggcaccagagcggccaagacccgggcccatgcagggggctgctggaggaggggagctcagaacctcaggaccacaccatcatgctttaccagagccacccacaaatgccaccgaggaggcgaggagggactcctcacgaggcagactttatcacctgacagacagggaaaccgaagcctagtgaggcgtggaggccccaggttacaagaagccagtgggaggagcagctggtgagacctgaggtcctggctcagatcccacctccttccgctgttccagaagggaggcgggtcccaccacactgcctgcacctggctgccctgcccccagcactcactcacctcggacttgaaggaggcctcgtcctctgagttggactcctccacctccagggcctttttggcctcccggggctcactctcggccttcaccttctcccctctggtgctgctcttgtccttggccggcttcttgtccgagaaggaggaggaggaggaggtgcggggcgaggtgcctggagcactccgggaccccttcgagctgctcttcttctgcttcttggcgctgggctttggcgagtcggcggtggccggccgcttgctggaagcccggggtgggggtgggggtgggggtgggggcccacccttgggggacgtgctttccagcttggtctctttcagggccatcttgggttccttgaaggcagccttgggcggtggcgccttctcctccttgggcagccggccctcgcccagcttccgcgaggtgtccttggagcttttggcctgctcacgctccagctccttggaggagctcttgctctcggagtctttgcggggccgctcccggtgctccttggtcaccttgtgtggcttggaggtcttgctgctctccttgttggcgtcctgcaaggccaagagcagggagggcaaggggagagacaaggtcacgtggcattgcggggcgccctgctccgccacccctgacccctacaaagcataatccacctgattcagcctcagctagagaaactcttccataaagcaaaaaggtaaggcagtaggtgagagttttacatggagctgtccctttaaactactaggaagtgtcagctggtccccggcagctgcaggctaagattcccctcagaattgaactgacattccctgagggattcaagaagagcacagggtgagtcaggcagagcatggccacttcgcccgcacccgcccgccctaacacctcacagctgggcctgggcaagtcagaggctgcgctggcactgcggggtgctggcgggcactggacgcagccctgcccctcatctcagcctccttcgcccagcactcatgctacgtgcgggaagctcagtgcttcctgctcggtcactcacgggcttcctttctgagccccgtcggcccctctccccaggactccacacccccagggtccagccagctcaggcctggcttcgggaagccaactgctgagcgcccactgggtccctgggtcccaggtaccgcacggagcaaacagctcccgggcttctcagaagggaaaccgcctgggtcgctttcctaaaacaccgaggacattcctaggtctctgcctcggaaaccccgggggtttagggtggagctggactcgggggctgatcccattgaggacagaggtaagatgatggcagagagcagcaggacacaggcccaggagtgagcccagctctgtgacctgcacaccacaggacccaggcagaaaaccgaagccatctgtgcctgcttcctcgaggaagggcaaggccaccacctcactgggcaatggcacaggccaggctggcagcgagcacacagtgtgggggctgccagcaccatggctgagttggctcagcccgcggccagcctgggcgctgctgcttgtatgctgtatgtttctgccctacaccccatccgataggcacactgccagcactccccacggtgggagccacgccttcaccttccctacagagaccctgtatcaccccacgcacccaggagcactgagcaggcttctctgctgttagccaccaggggctccacccttgctaggaaaggagcagcggccagcaggtgcacggcggccccagagcctgtccagacaattgtgtacctggcctcccggcacagaagccagcagcagccagatcccgaaggccctggggaggggctccgggagcagtgagagtaccagggaggaggggggccacgcttcacagatcccccaaagacatgcgggaggggcaggctgggtagaggcctctgaaaaccacctgagtgtccagggacagactcctcccagcaaaaaaccacagggcagacacagctgctgccccatggccagtctcctgggctggccatcttcttgcaaagccacagcccacattcagtgtcaaaggctcaggaacagtaccagtggctgtgaggcctctgccacctccttggagaaagggcaagccctgtgcccagcctggctcttccacctgggacagcgggagtgcccccagaatccccccagctggcctgggccatgcagggctatcagggggtgtccccttgggagctggggtgtggaatggggctgtgctccacagcaagctactacccaaggagggaggtgtgagagactgcaatgccacctgccaccctggcctcttccagcaggggacacacgcccagctgggctgcaggagctcagccggggtcacagccaccaagggcagaatgagagcaaactccaaaggcacgtcagaggcccctaacacaggtctcactgtgtgcccctggcctggagtcagctgagccgccattgccaccagggcctgcctggctagaaggagtcttcccacacaggagcacaggcacccgacaccacaggttctgaaattaggcactacgatttttttgtttgtttgtttgtttgcttttgttttgagacggagtcttgttatgtcgcccaggctggagtgcagtggtgcgatctcggctcactgcaagctccgcctcccgggttcatgccattctcctgcctca[133 bp omitted]actaaattttaagcataacatgagcactctccagggtgagaagccatcaaaatcacgtttgcaaggttgtctgcgaacctccacgggaaagagcaaccaggccaagtacctgacattacatgggtgacacctggctccctgcagctgctgccaggcaaggctgtgagagggtcctgccccctctatgaggctgtggttcctgcctgccacgccactcttgggtggtggctgtgaagtggggacaaaaccccaggactgagtcccctaaagctgccgcagctgcactcaccagcagtcccccggcctggggattctgatgggcaaggccccaaaaggcccacctatcccatctctctgggctcagggagccctgctgaggcccctctgcttggagcacatggcccggccactcactctccaggcagagagccagtgaccaaaggaggtcgctcagctggggaagaggccggttcatgggcctgtgccacccagggctccatggtggggccgacagctcattcgccaggctagggctcggggcagaggggctttctcagaatgccctcagcagacaagtgcctcggcaggaccccatgctgcccgatgctccccacagatgccgcctacatctctccacccggtagctggagaagcctccagggacggagagggtggagcccacaggcctcctaagcctggtggataaactcaccagctggggcctccaggggtctcagagacactccggcaaaagataccaccagcagccccagcagacgcagccccgccagccccagggagggcacctctccaaccaagaagtcctttctacgcagggttttaggtggcttgaagtgacccgtacagaagaaatcttgttgtggtagctgagagggacactgccaagatccccagcaagagcttttccttcattgagcctccacaaggctcagggagagataggccaggaggccgagtggggagaccccagggttccgtttcctactcagagaatctggcaagtctgacgatttctaagacctgctggccttggggaaagagccagaaagacctgcctgggtgctgcggttcttctcccgcatggctgacggtgagtctgtgaggcagctggagagccctgcctgtcctgcctgggatggctgggcccacacgcagggcctggcagacaagtgaggtgaggagaaaggagaggaccggtggagagatgtgtgggtggcaggcaccgggcagctgccccgagggcccgtgccgctcagcctccaggaacggctgtgctgagtgggcagctacagaggactggggcgtgctcaggggttaaagggacactgtgatgccatcaaagggctttctagcttgtcttctgaattgctgctcagggatggtttagagagagaagcctcagaaaggccgagtgccacccacctgaccgactgggccgagatgagaccgtaaaaagtttcttccacactgaaattcagctggcacccacctggcttcccctgcccttcccccacgaaactctgcagtgagccatagcccgagatgcaaagcctggcatagccaagggcagaagtagccccagctgccctcaggagggttgaagaggtgggtagctgcagcctagacagagacactctacccagcggccgccccaacagccttcggcgaaggtctcagggcttcaggccgagcagtcctggggccctgccatcacttggcagaacgggagaggactaggcagggtctctggcctcaagatgaacagggcaaagagcccatgatcacgggcttattcctgaaatcctagggaagcggcagtgcgcagcgaggggtgtgcagagagctcaaagaggaagacgccaagggagcgagcaggtgcggaaggcccagcccagtggagggagggcgccggggccagacccaccacagctgggccccggcgctcccacgcgactgggccttccgcctcactaaccttggagccgtgggatggtttggtcttcttggggtcagagaaggcagagagtggaattgtgggtaacatggggtagtcgggactgggcctggacaccgtgtctgctccttcgggcattaccatcacctagtgacagagaagagacagtcattatcgatgggcagggggcagggggcccacacgggccgggctgaaggtggtggggcttccctctgcaggaggggagaagggagagcctgagcgctttcccgaaagaatcccaggtgcttccctgctggggactgggtgctgagcacgcagaagaagcaggcatgggtggggagcgaagaaaagcccagggtcccaggatggctgggaccaggtggggccacgcggccttccgggaacagtggaccggagggctggcccaagaagacttgcggagcacactgagaatcatgagaaggcagctgcggccgaagcctgacctacgcgcttaggtttagggggaacagctcagaagtgtgagaggccagccagatgcctgcgaaaggcaggcagcaacttcccggggtgcacatgggtgcaactccagtgggtcccacgtgcccggagaatgagccgtccttggtgtgcggtgactgcagcggacccgaacagggcaagagcacccaggctgaggccgagaccaaggcagacgacctgtgcctactgggggggtctctctgcaaagcaggcccgagtgagccagcgagcctgcagcatggggcacctgctcctgcgctccatcagaggctacggatgacgaaagttctggggtccttccaggagggctcccaggaaacacctgctgtgcagggggaagctcggagcaaggtcttgagatatcaacactgcgagttaaggaatgccaccaccacagagaaaagcctcccagatggccgcaagagagaacaaaagaagaaaatacacttcaaaaaaaaagtattgaagtcggtagaagaagcactgctaacagccttgagcacctgcagttcccggccagccaagcctttcatctaaggacactgatgtcatgcggccatggggacattggctgaaaagaggccatgggcccctagggtccctgctctgagctgcttctcagagcctgtctgaccatgatagctcagcactgacagcatgtgtgccccagccgtccctgaaaacacgccacgggaggccctccacactctggagcacgcacatcacgcaagctcacggaggagccacagaaggctgccatgcacagacgggcttgccaggaggctgagccccattcgctctcaggcccattccttcgactctcatggtaatttaccttctttcccctcaaaacaatgccctagactgactgtttcaggatcacgcagtgtctcgctctagcacagaccgttgagaaaaaggaactgggaactgaacacgcagatgactcccacctccaacaagtgctgccaggaggaccaggctccccggcggaaacacagaccctcagccatgggggcagagacaagacacggtcctaaggggcacaaggctggaacggcggaaagtcctaccctctctcccattaccgatctccaagcaacccccagtgagaggagcagagaaagcagcgctcgctgacacagaaaccagcccctcctcccgggtctcccagcacccacggcggggggctggggtcacctgctgctagacggccactgcctggtcccgggaagccccgagaggagcccctgccaccgaggcctccggctgctcctaaggctgagagccccactccagggcaagccctggaggcctggaaagttcctgcccagacagccagctccccagacagcccaccctcagagggcagagcgcccagcgcctggggcagagaccccccacggcgcctgcttcagcctgcgcgtctctctgtggagccagcgctccctcctgactggcccttcctcccagccttgccccgcgcctcctccccgcccctggcttttatgtgttgagacgatgccctcagagccttcatcgctgtggagcaaaggaagccgcctcccacagggagccaggtcctggctgcagcccagagcggcccagggaacgccacttcccacagccacgccaccacggaacctccggggacgcccaaaaacacctactgcaaacgtggtgaaaacacctggccatgaaagaaggtggaaaagcggagccaggagggcgctgggacccagccctcacatcctcaggccacccagcactcagccacgccatccacataggcccacgccggcactgccctccccggatcagaaccacaagcagggcttcacaaggatcacagcaggactcactcaagcttctacatggacagacgcctccttcttcttaggagaacgacggccaccaaggacctgaccatgccccatgaggaggaaggaggactccccagcctgacacccacagccacggtgccccaaatccactcaggaggcgacccaccccacccgcataccccacacgtcatacatgccacatacacacctgacacattcacatactccccataacacacgtcacaccatacgtgcgtgacacaccacacacttcccgcaagtgacacgacacacacgccatgcacacaccatacatgacacagcagacagcgtatgtacataccacacaacacacacacacgccccacacccgtgacaccacacaccacacccctacatgccacacatgccacacactgtacatgccacaccccacacatacacacgacacacaccccataccacacatgccactcacaccatacacgagacacatgccacacacaacacacgtacatacacatgacacaccacacaccgcacacgacacacaacacgccaccccagcccgctccatcacaggctcaggctggcacccaggcaaaggctctgtggccctgggccctgaaggtggcattgctgttctgtgaccaggcctcagcctgcacgtccctccctccacgcccccctcctccataaccaccaccagccctgcgcccaccctgttgccaagagccctcgtggggaactctgagcccccacagggtccggagggctcgactccagccaccgcatgggggtcccggccacacgactcctggagagccctggtcccagagctggcactgtcgtctggcctcccgaagtcagaggtgatggcgatgcgcacggcaggggccctgtgcggaggccctgcccagctagttacaagccagctccaggcccagccacgcggtcagaccagcctcgcgcccatcccttcccagcacttcctgcaggaaggtgctaattacccatggccacccagaagcacagggtgaccagcaacgagtcacctgcagccaccacgccccggcacaggttgtggagctcccaggtcccctccagctctgctgggtgctgccgtgtgacctgcgccttgggtctcggcccccagcaccgacacctctggctgggcacagacggccgcagcaaagtagcctcggtggagcggccccttggcgggcaggggcggggcacactcaccccgccggcccgcaggagcttgtaccggaactccgtggtggggttgttgaaggtgagcttctcgcagcgcaggtggttcacgggcgggttgccttccaggttcaggaacaggtcgtaggtgaagcagaccttcctcggctcctcctgaaacagagaaaacaagaaagtctgcatcagagggtggccgtggtgcagggacacagctccccattggccctggtcctcccctctccctcactgggcctctgttcccctccctccgatttgcgcccacttctctctcagggcacctcctgccctgcccttattcaaaatcgaccagcttactatgtgcagctaactgggtcttgcaggccccatggcagaaagaaagctcattcatagccatgctctcggactgttatgggaaacatgtacccccttcaaccctcacagcgccactgacagacagggaaaccgacgcacagacaccaactaacacgtggcagcactgagacctgccccaggcctctgaggcccacaatctcaccacctctattccccacttcctttgcagccagggccaagcccgacagacgcaggacacaggacacagactcaaacgacagcacagcacccagagggggcaaaagtacaaggtcacgacccagtttccaggaggctctgtccactttgggtgccgccccgcaccctcgccaccccagaagacagggacgctcgcctggcatggggcaggcgctgatggattttccgcacgaaggtgtgaggagttgacagggtggcctggaaaagggctgtgagtgaggggctgtgatgaatacagaaaggccaggagggctcagggcaggcaggcttgcaggaaggagctgtctgcacgggctcctgtggaggcctagccacatgtgcaggggctgtgtttctgtgaaccttgaaatttcgaagcaagacatttttttttttgagatggagtcttgctctgttgcccaggctggagtgcagtggcgcgatctcggctcactgcaagctccacctccctggttcatgcctggagcctcccaagcagctgggactacaggcgcccgccaccacgtctggctaattttttgtattttcagtaaagacggggtttcaccatgttaaccaggatggtctccatctcctgacctcgtgacccacccgcctcagcctcccaaagtgctgggattacaggtgtgagccaccgcgcccagctgaagcaagacaatttcatctgcttttccttaagaaccctgccccatcccaaatgatgtaagccacaggtcccaggggagtgtgggaaaaccgcactatgacaagcacgaatgtcacacggaagaagggaggttttcatggaaacaacgtgcatgggccgggcgcggtggctcacgcctgtaacccagaactctgggaggttgaggcagacagatcacttgaggtcaggagtttgagaccagcctgggctacgtggcgaaaccctgtctccactaaaaatacaaaaattagccgagcatggtggtaggagcctgtaatcccagctactcgggagactgaggcaggagaatcacttgaatccggtaggcggaggttgcagtgagctaagattgcaccactgcactccagcctgggcgacagagaaagactctgtctgaaaaacaaacaaacaaacaaacaagcaaacaaacatgcaggctcatgtcctaacattatgggcagctggtgcttgacaagggtgacgacaccactcaatggggactgaggagtctcttcaaccaatggtgctgggacaactggatacccacccgggggagaatggtggtggccctactccacccacacacagaaaacaactcaaaatggatcagagacctggacgtaagcactaacgccacatagctctcagaagaaaatacaggtatcaatcacgacactgcattaggcaattgtttcttataatacaacaccaaaagcacaggcaactaaggaaaattagatcacgtgaacttcggaaacatttcaaaattttggcccaggcatcgtggtttatgcctgcaatcccagcactttgggaggctgaggcaaatgcagagacatggatgagttggtaccttggcgggtgggaagtgcaggagtggctctaacagacacagggtttcttttgggggtgatgaaaatatgctggaatttaaaacttgtgatgattgcacaacactgtgaatgtactaaaaccaccacatctgtacactttaaaaggctgaattttatggtaggtgaatcacaacgcactttgttaaaatgcagtccaccgggataaaaataactaagaggatgggcgtcccgtgaaggcttctgagttggggaacactgctgagaagctcgagacatcacaccggctcagtcagcagtggggacgcaaggcagagctctgggcccggcgtcctctgcaccctctttattctcagccctttccccagcagcctaagctcgcaggtgtacggccacaccctcagtcctggtgagaggggacagaccaaggggctcgaggtgctgcagagtgccgtctctccccagcctgcctgcagtgccggacggctcacacgggtggcaccaggctccgcaagctccggggacaggcgcctcctgggagtcggggcccagctagtaacacagttggcagcggcagctcctgcggccgcccaggagtcccaagtgcacctgcatgggaaggagcctccagaaccacgagtccggtcagagcagacaagtgaacatgaacaggttcccgatccaaggccagcgggtgtggccgacagtgaccttgtgtggggaaagccctgatctcagaaaagtgggtctctgccccagccccaggcggggaggtgtgacctgtctgggccaggctagggctccctccccttgtccgaggggacatgtgacaggcttgggtaaggacatggaagggagggcggcctagggagggctttccttcccaagtcataaacaaaactgcagggacaaagtttctcaccacctctctttgtcctgccaaaacgcgagaggtggtgcctgtgggggcggcttccaccacaggactatgtggagggatgccaggccctggcgcctcttgccttcttgtcctgtaagaagaccagcccctacaggaagcccctgctacacagctggtccgagcaactgaatgtatccctaaccgacacgccccccgccaagtccacacttcccctacgcagctttccttgaggactcaaatgtggccacgtgcccctcctctgtggcccctgcctttaaggagacacttgtcccagtgggtccctgccaaactgggaacctggggctgtgaggactcctctcctgtcttcccccgaggtacgcagctggcctagttccaagtgagccaactgagtgagatgctagggcagactggaggggggatggtccagcagcaggggtgggaggggctgggaaggctccctggaggctgtggtggggctgaaggatggccaggagctggttggctcaagaagggtaagaggtggacgggtgcccaggctggaccgccaggagcacgcgtggcctcacacaggaaacagtggcatggactgcggtgtcctcgcgggacccccgggctccagcacagctgtggtggagacaggtggtgacgccgaccctggggagaagggccttggccgcccctgcggagggggagccctgtccggaggtggaggagggttttcagctcaggaacaacggtcacatccatgtctcaggaagccacaccctccggcctatggcgcaaaggcacttctgggcacagggctggctggaacctggcagataaaggggaacgaggtgggggaggagagctcttgtcctgcctttcctacagaagtgacaccactaggtgaacccggagaaggcaagcagctaacctgcacagactgtcctagctgacccaagaaggaccacgagagcatcctagcacctcaccatccacttggccgacagcagagacgtgggcagccacacagagagaccaagcctccagattcaggcccccaagacacggacacacgagtcagagggcgatcctgagtgccactgcatgtccacaagcagcaaaaaccagatggtaccaagctctgtgggacacatggtcctgactcttcaccaaatacatagcaaagcaaaaaaagagtgcttgaatgaaaagggggcgggagaatctagaaaggaatttaagagacaaaccaaagaatcacagcgtgtggatctcatcaatgtcctgattcaaacaaacaaacaaaaaaaaaaaacaagactttaaacactggcatattgagagactaagggattattaatcatcaattaatataaccaagtaacatggtaacataagagatgactaattcatgggtatggtcctggtagcactgtcttgttagaggccccttttgaaatatttacacatgaaatgaggatgtctgggatttgctccagaatgaccaggagggcagcgcaggctggaacgggcttggctgtgcagggaccacctttgggtgggtgacggctacgagggggtttgttgcatctgcctctgtaaatgcttccaactttccctggtaacttctgagtggacgctggcagcacggctgtgcagaggatgaacgtggctggggggcatcctcgtgcagaaagcctggggcctgagggacaccagcaggagcctggccacggtcctgcctcctaggcctcaggttcctcacgggcagcatggggggattcgctgcaatgccacagccacagtgctcagcaccctgcctatcacccacagaagccgtgagtgcccccacaaagcagcctgggctaagaagggcacctggggaggcgcagccagacggtaccaaagcactgggatgccccagggacgctccctagctctgcccactgcctggcacagggcaccctggggctcggaactgggtcctctcctctccacactcctggccacagctgtgcaccctggctgcacagcgagtccagccgcttctcccaagctcctcagccagcccctctctcctggaccacctgcctcctaaccgtcacccgcttccaccacagccccctttcaggcacggtatctccatgggctcagggctcaccctagcccaccaatggcctcgatgagcctggaggaggctccacatcctcggtgcagccagagggacatgctgccttcttccacgcctcctccacccagctcaccccttcctgacccccacccgcccttatcccggcctgctgctgtccccaggcacagagcacagctcactctctgccagctctccttacagtccaaagcatgtctgtcttctgtcccagcatcccactgacccatgaacaccacacacaatgggactgtcctgttttgttcctgatgggcctggtgctggactagcaccctgtctgctgaacatccctaaatactcatgtatccaccaaaaatgccacaggcgcctaccataagatcccagcagggatcacaagagagaagaggtctctaatcttacggatagtcagagcacaaaggcgaaacagccacgcagcagtgacaccagtgtgacaccaactgtaccgtgtcacagtgtctgcagagcgctgatggtgaccaggcactttctaagcactcagcggatacgaatgcttcacagccccaaacccaggggttcctggtgtccccccgtcacagatgaagatgctgaatcagacaggggatctgggcagcagcagagccagcgcaccccggcagaggttcttgggaagccccaggtcttggagaggttcctgttgcccacacaaaccaaacagggaaggcagccacgacgaggagacccggcatgttcacaactgcagagaggggcagcaccgaaaagcaaggaaggcaccccctgccggccaggtagaggtcacgccccgaagcaccctgcggccagcaccctgggattgagattggctgctggaagcggccagtgagtcacgggcactgggaatgactaaacggcatgccctctacacgagacctgggcctacaaagcttaggagcatcccagggggctgcggaccccttcctggctacccctggaaaccagcctcctgggagatgttgggatagcagctccttcatgcccctgaggcctggcagcaggctccgtgagcaatggcaaagtcaaaggtggctggccaaccagcccaggtgggacacccttagcgactccagccggactgtgctgtgacccactaatgtcagtagcctcctagagtcacgtgttcttgggccgggccaggtcgcgagcagctccccactcccaggctgctggccacgagccagcgtctctctggcctcgggaaactaagatgcagacgaactggccaaacaggtgcctgtgccaaaggctgcagcatgcaccatcccgtgcccggggtggggagtccaggcagcgagcccgccacgcctgctggtgctccttgggatgaggatcacaggcgccgagtggccaggctggccttggcacgaggcacagcaaggcaaaggccctgtggccggcgggccatgcgtggagcgcctgctgctgccaccacctctgagaggccacactccctctgccccacaccccacctggaggacacccagccttccctcccaatcctggatgtgaggggagagcaaccagccctcctgcaaggtcttcccgctcctgccgaccctggctgtctcctggccatctctgccccgccaagcttgtccagcggctgctcagcattcccctctgaggccccagggttcacagacacatgctgggcttaaaaaaacattttggccaggcgcggtggctcacgcctgtaatcccatcactttgggaggccgaggcaggtggatcacaaggtcaggagatcgagaccatcctggctaacacagtgaaaccccatctctactaaaaatacaaaaaaaaaaaaaaaaaattagctgggcgtggtggcggacgcctgtagtcccagctactcgggaggctgaggcaggagaatggcatgaacccaggaggcggagcttgcaatgatggagattgagccactccagcctgggcgactaagtgagactcttgtctcaaaaaaaaaaaaaaaaaaagatgcttaagagacgaagcaatcaagagaaatgcttgggcctggcacaatggctcatgcctgcaatcccggcactttgggaggctgaagtgggaggatcgctttgaggtcggaagtttgagtccagcctcatgcacacagtgagatctcatctctacaaaaaaaattttttttaattagctgagtgtagtagtgcacctgtagcaccagctactcaggaggctgaggcagaaggatcccttaagcccaggagttcgaggttgcaatgagctatgatcaggccactgcatgcaacctaggcaagagtgagaccctgacttaaagagggaaagacagagagaagctccaaccttacttgaatcctgacatgaacacgttaattttaaaagacgtatgtccacacacacagagcttccctcagtttttgcagggaactagctgcaggctctagagagctgactgtgtgtgtgagagatgataggggaaactgatggtattgggcatgtgataatgttaaagaattactaatttaccaatttctagccagaatgatattgtggttagggtttttgttttaagaatcttatcttacaggcacagcaggaaatattagcagattagtagacgtgatgtctaggacctgattcaaaacaacccttgcggggagagaggagaaagcaccccatgcaggctggcggctgtgggagccggaggtggggggcggctgctctgccattctctctgcttctgtgtatgctttttacgtcatctatattagaaaggagaattaaatagataagcttggcttggcccccagcctgcctcacagctctcaatttgaattcaacaccacctgtgtcccttccaccctgcccctgtcctggagctgggaagacagtggggaaccaggcaagtccccgccatggagcccagatggagccctccgccagggccttctccagccagcagcaaacaccttctccgccagggccttctccggccagcagcaaacgccttctccaccagggccttctccggccagcagccaaacgcctcctccgccagggccttctccggccagcagcaaacgccttgctctgcttcaggcggctaccttggaactaggcagcgagccctgtggggctgggtgtggggccacaggccttaccccgccacgccttagtcagtccacaccaacactccaggagggcatcactctctcaccagctgctaggagaggaagctcaggtttcgtggcatctggccatttaccgaagcctcacagaaccagtaagtgccaaacccactagtccacacatgaaaagcctctcgcgtccacagagccctgcccctcctctggacacagctgtaaggcactaggctctcgcgttcaccggtccacggcatactggaatggggctgacacacagtccggcaagaaagcaagggaagacagaaatgtggaaaaaagacgcccaagaggcaaacaacctcatccctgaaatcccacgtccaggatgcgatccgaccgaaatacccacagagtataaaccaacgtacgaggggtcaccgaggcacccctgcagagggagacccggagatgccaaatgtcccccctagtcagataaatgacagctgacacaaatgccagggaacacgacatggaccctggccagaaccaggcacagcggcctgtgctgacgccggagggccacgggcagggagttcagaggtgtgagtcacactcacgcccacacatgcacacacgcatgcgtacacacacccacacttacccacatgcacacctgtgtactcacacatgcacatgcacacacccacccacacacccatgtacacacactcatacacgtccatactcatccctcacctacctgtgtacaaacacacacacaaacacacccgtgtacacacacacccccacactcatacactcagacttacacacacacctatgtacatatacacacccactcacatccacacacctgtacacatacacactcacatgcacactcagactcacgcacacagagaactgttttggcaggacaaacattgcttatcatggagaggatttcaattccttgtaatctgcatatatcaccttggctttgtcatcaaaagaaaaacttttttttttttaaggcttaggtaaaacagcaccatgtgggctgaaaacctctgaccaggagtcagaggactcctggatgctgaagcggctcagcactggctcactgtgtgaccctggacgggctgctgcacctctctgagcctcagagagaggcaggaatcaaacaggaaagaggcagaaaggccaccggtgcctctggctgggaggacagtgtgggcagcattagcccaggccccttcacgcctgcctgaccgctcagcctgggaggccagggagaccccagaggccccgccccctcccacacatgtgctcagggcctgcagccccatgtgaaacagcgaaagccagccacctacaggcctgcctggaagaggctggccctggtcaggggaggcgggggagttttcttcttgtacccctgaacttcaaactccactgtggagcacgctgccgccactggaaggagctcgacagacacagcaggtgacgcagagggcgggctccaagcggagctggcacccggcgcaggtgacgttgcccatctgtgctcagcgtcctcacctgtgaagtgggaaaggcagaacccaccccatatacaggcactcaagtgctactcctcatcacacgctggcccagagacccccgggatacaccgttgggagaagaaagcaaaccacgagactgagagcaccacggaaccctacagctctcagattcaaaagcgctgtgggggtgatgtcagacgcacagggagagactggaccccacactcagctacgaacctcccgagacagcaggagaattcaggggcagagggaaggaaaagggaggagctccagttcctaccctgcgtccttctgtgcttcgcatttccgataaccagaatcaattcctgcatcgatgagcaattagaaaccaaaaggaggaggcagaaatgcagacaccacattttaaaatgctctccatggaaacagacgtttttagacttaaagtttggcttctattaactggaagccaaacttaatgatttctcctcagtctgacaccagaaaaggcagaaagcagccagcaacgtaaacacctgtaaaatggcagtttgaaatctggaccataacaaatgaagacaggaggaggtatccccaagatgagcccatgaaagtcaccggcccaatgctgccaggctgagagcagctgagctgagacctgcgagtggtcagtcccggggcctcctgcctccctcatgcccagtatgaggacagcctctctctaccctgaactgaggccgccggaacccacagctcctagacccccgccccatcccgagagcccgtgtcccccaagccactgccaggcagagtccagctggaggcagggtccattcagggctccagggcgccaggcccctagcacccccgctggacagcaccttccctgctctgggagccacagggcagatgccttcgtcctgtacaggaggcacaaacagtcggaaagatggcctcagagaagccaggaaagaattttatcaggtacatgccgagataggaaattggggaacataatgggcgctttcaatgcccagccaattcttccagccccttctctagggacccaggagaaggcattctgggcctctgggccgtcccaccgtcccagccttggaggtcctggggtggccgtggcgggcgcagggttgcgcagcacctcctctctccctgcagcgatgggcaccttcgttctttccttgtgcttctctgcccggctccagacccgccctctaggaaacacagatgcatctggggacccacttcagggaacagaaggatgctctggggaaagacagactgcgccacagctggcacgcatccatgcggcttgtcacaacgcggcagctcggccctgccctgggtccccgcacacaatgtggcttctgttctggctccctcggcaatccaccagccaaggcctccccctcggccacatcaaccggccgattgtccctggcggagcgctctatgggctcaccagaggggctgcccgcctcctgaactctgcaaggccctgggagcctgggagccagggagggagttgcttgcagaagcgttgctccgcttctgcgccagcaggtcaggggcaaggggagaagacaatgggggctcagagggggctccctgcctcccagcctccctgcctcaagacctgctctccccagtctcaaactgagcgcacgcaggggcagcccaagtggaacccatatagggcagcatttgcagctaagagccatctccactctacagagggtggcggctatggagggcaccccggcttggtgtccttggaacctcccctgtcatgtgcgactgcctagggccccccaacacaagccacccaggatgtgtcaggaagatgcctctgagggtcttaaggctatgaggccagtgcggtttaacttacttttaaaactctccacgtaatgcccttcctgtgccctcggacatctgcgtgtgggaggccacggtggactggtgatggctgtggctccctgtccaatgacagcttgttgcaggggttggggaggaggtctaatattagtggcaaataaccaaaataaacttctttttcacacttggccatttctaacactggactgtctctcacaatcagtgtgtacccctcatgtgctttctctcctgctctcaggacgggttccttcaattgaagtcacgggagacttagactgaaggaagaggaatctggcgtcaggggcagggcaagttttaccgccccaaacagccacactcccctttcctggtgctgttggtaccgggttcaatagaaacaagtgccccggccagcatcccctcatgtgactgcatctacagggcacctggggggctgcgagccgacaccggccacaggagaggaaagcaggccactgtcatctcagatgacccctctccccatctgacagcagctctctctgcccctctcggttttgccaagcacaccaagccagaaacgcaggactacttggcagccagcactggcatgaaagcgacaaaggtgagagctaaaaggattgccaaggaaattaagtcacatcaaatgatgcctcagagaagagctcctgagtccagctgctgatcttggctaatgcctcaaaacaaagcaagacaaaaatcaaccatgctaaagtctgctgggaacgtaaagcgggaacgtggcggggtcaccaagcggtaaagctgaaagagaccccgagagccagtcccagcccgagcagggccatgcatgtcagtgggggcccccaccccgggaaggctcggggaggccggcagcccccggcccctgccctgcccaggaccagggcatcaaagcctcccaggtcagctctgcagcccctcccgaggccctcaccctgcctcctaactgactccagggcacagacaagcacttcctgtttggcagccactgaattccttctgggagagatggagccaggtctgcattataatgtcactgacctactccagaacatcatgggacaggcgtgggacaggcacctggctggggcttctgaagccacggccacagagcttacgcccaaagaggcaggtgaacccagaggactcgaccccttatgcaggatctaacagcaaatgccaccatgtcacccccagcggatgagcagctctgcccacccagctcacctccctcacactcgccccagccccgcttcatcacctggactctgcctttcaaacagctgcccctccccctagaaggg[136 bp omitted]cacggtgaaaccccctctctactaaaaatacaaaaaaattagccaggcatggtggcgggcgcctgtagtcccagccactcgggaggctgaggtaggagaaaggtgtgaacccaggaggcagggcttgcagtgagccgagatcacgccactgcactccagcctgggtgacagagcaagactccacctcaaaaaaaaaaaaaaaaaaaaaagaagtcaatctcgcttcttaagagaacccaaccgaccctttctaactgggtccccgtgacacactcatagcacccagcccctgggcttcctggaactcattctgatgggtcacttcctctcccgtgtgtctgccgtctcttgccctgtcagtctgtgaactccacaagagaggggaacgtgttcacttggtcttcactgggcctagacttggtaaatatctgacacatgaagaaatccatgaaactccagcaaagaatggaagaaaagcaattcctcctcctcactgtaaacgaacattaaaaaaaaaaaaaccctcatttgcgaagaataaatgacaagggcctcccttactagatacccactaccctttgacagtctcccccgcctctctcaacagtgggcttggtgcatgccgccagcggacagcgaaaacagaggcatgggcctcaagtgtggcaaagggtttcagacacaaaaccagaagcactcgccagaaaaacaacagtaagacgtccatcaaaataaaaaacgtttgctagacaaaaatatactattaagagaatgagaagataagccacagacttggagaaaatatttgcaactcatataccaagtacaggacttgtatccagagtatatacagaactcttaaaactcaacaacaagaaaacagctaacccaattttttttaatgagagggaagggcaaaattctgaacagatactttaccaaagagaatatatgggttgcaaataagcacatgaaaacgatgctcattaccgtcggccgtcagggagatgcaaatcaaaacctaaccaggtaccacttcacacccactaggacagacggctataatcaaaaaggcagaaaatgagttgctggtgaggatgtagaaaaatcagaaccctcatacccggctgggggggaatgtaaaatggcacagctgctgaaaaacagtctggcagttactcaaaaagttaaataaagaacggggccaggtgtgttggctcacgcctataatctcaacactctgggaggctgaggcaggaggatcacttgaggctgggggtttgagctcagccttagcaacatagtgagactctctaacaaaaaaaaatttttttaaatcttttctttttttcctttctttctttctttctttctttcttccatctttcctttctttctttctttttttttttttttaaagagatggggtttca[131 bp omitted]gatgtgagggccggg[176 bp omitted]gaggcaggagaatggcatgaacacgggaggcagagtttgcagtgagccaagattgtgccactgcactccagcctcggcgacagagcgagactccgtctcaaaaaataaacaaataaaatttttttttaaaaagaaaaactcactgggtgtggtggcatgcacctgtagtcccagctacttgggaggctaaggcaggaggactgcttaagtccaggagacagagctgtgtgagctgtgactgcaccactgcaccccatccagcctaagcgacacagtaaggccctgtctcaaaacagacaaacaaaaaacccaaaaagttggccggtcacagtggctcatgcctgtaatcccagctacttgagaggctgaggcaggagaatcgcttgaactcaggaggtggaggttgtagtgggctgatatcgcacctttgcactccagcctgggcaataagagcaaaactccacctcaaaaagaaaataaaaagaaaacaaagagaaaaaaaaaaaaaggaaaacaacctgaccatattcaagggctggcgaagatttggagcaacgggaactcttcctgctgatgaggctgcaaaatggcacagcccctttagaagaaaaccactgggcagtttcttaaaaagttaaatagacccatatcatgtgacctagcaatctccactcatttacccaaatgaactgaaaacgtggtcacacaaaaaacccgtatgcaaatgtttagggcagccttattcataatcacaagagctggaaacaacacagacgtccttcaacaggtgaacgaataaacaaaccgtaaggcacccatgcagcggaacactcctcgaaaaaacacaacaaaacacgaagattcattcatatggcaacatggacaaatctaagtgcgctttgctaagtgaaagaaaccagatacaaaagggctacatattgtctgagtcttatgacaatctggaaaaggtaaactacaagaatggcaaacagatgagcggttgtaagggctgggggtggggagggggactgacttcaaagggacagcaagtgggaatcggagtgggggaggcagagtcccggtagatacacgactctctgcatgttgaacccagagtaaacgtcacggaatacaaattaagaaatcagtaactaataaccggatgggcagagggggcagacccaagatgaaatgcaactgagactgacgaagctaactgtattacaaatgcatgacatgaccaccccagggaaagggctgccacaaataaccttgtacccttgcagcgttcctacttgacagaaagagctgcacgccaatgctgagccctagctgccaacacaggagggctggctgttgatgctgaaactactttccgggtatcctggaattaaacgggtaaacaaacacagtacagatatcgggagccaggtttcccccttcagagacagctacaaggcagcaactggggaaggcgtgaatgagcccgctggtgctggatggagttggcagcctcagaggaacgtacgtttgttttcatattacacagatagatacagaactaaacacagatgtaaagggtgggggtggtttcctagctctgtcatatgagagaacctaaacgcagtgacaactaagcagcagtgagcacacttagctcccagatcttggcttttaaataccattttccagcaacaggaactaaggctcctgggagcagcggaagattctagggctggggcagggaaatacacggtgagcctgtggtgccagaatgtgaaagcacccccaaaaccatgggaacatgaaatgacaggcccgaatgcgagaacaatttcaataacaaacaggtaacaacagactggattatgaccccaaagaaaaaccaaatacctatgaatccatccgtgttgatacaaataactgaatacataaatggaagagaagggacggctcttccttactgaaaaattccagttaataaatgtagaaaggaaggaggaaattaaaactaccagtaggccaccactgggggaggctaaaattagtgggtggtactatgggttaagtagccctcatccaaaatgcttgggatcagaaatgttttggatttcagatctttttttggattttcaaatgtctgcattattcttactggttcagcatccctaatctgaaaatctgcaatttaaaatgctccagtgagcagttcctttgagtgtcctgttggtgctcagagtttcagattttggagcattttggtgttttgtttgtttgtttgtttgtttgttttttgtgagacagagtctcactctgtgacccaggctggagtgcagtggtgtgatctcagctcactgcaacctcttcctcctgggcttaagcaattcttgtgcctcagcctcccaggtagctggaactacaggcgtgcgccaccacgccctgctaatttttgtatttttagcagagacggggtgccatgttggccaggctggtcttgaactcctgacctcaggtgattcactcgccttcgcctcccaaagtgctgggattacaagaatgagccactgtgcccagcctgagattttggagcattttttattttggatttctggattagggatactccatctgtatttttaaaaacagacaaaacaaaacaggttatctgcacagcttcaaagtatctctcccaaaatgggtattagtaactgtagtgtttttaacctacgcccaccaggatggaggggttaattcctctcccttgagtgtgggctggacttagtgacctgcttcttctaagcaacaaccagtggagaaacctggcagatgccacttaaccaggagatcaaggtcaacctcggctgttaaccatggatcatgttaatatctggcacttcctaatatgatggaagaggaagtgcatttacctctgtggtcttcttatggaactctatagccacggactagccatgagaaaacggcaagtagagggagagtctacataataccccactagcacatttcaaagatatcaaggtcatgaaagactgaggaaagagacacaggcaacagtgcagcatcctggggtgggttccacaacagaaaaagaacatgaattgaaaactgggaaacccaaggcaagtccctagtttagttcacggcgattgtactgatgctactgtcttggttttgatcactggaccatggttatgtgagatgttaacattaagggaggttgggttgtgggggaggtcctatgggaattctctgtactatctttgcagctcttctgtgtctaaaattatttccaaattaaaaaaatcgtaactatgagagattcccagtcaggaaccatactcggttcagtaacgaagatttttatgcgtctggagcagcttgggtgtgtgaatctacttctttgttcaactgtgaattttatggactctaaatacagatcaagcctttctgatgacgtttccatatccaaattgagacgtgcagcaagtataataaacagactgaatttcaaagacttggtatgaaaaaagaatgtaaaatctctcaatacttaaaaaatattgattacatgttgaaataatgttttagatacactgagttaacccaattactaaaattaatttcacctgtttcttttgaacttttttaacgcggctaaaaaataataataataataattaagatttctactggacagcccggggtctgagatgttactcactcactagaacaggaagggctttaaatatctctgaccacttccaggacaacaaacagatacaaagagagcatttaaacaagactccctcatctgactgggccaagtgcactgaggaaccgatttattcatccgggccactgccttgtcccggggcagccccagcatgtcctcccagcccacagtcaaggccactttccaaaagaacagttcagccgcagcatgcagaagcctcgaggccgcatgtgatgggagggaggccacccggatccccccttgaagagctggagcccccagctcagggaagttcccatcacacatccagtctgcccagcaagcgctttactgtcaatgcttaaaaataggcacttatccagaagatataaaggacccggtcaagcaaagtggctcgcgcctgtaatcccagcactttgggaagtctaggtgggcggatcgcttgagctcagaagttcaagaccagcctgggcaacatggcaagacctcatctctacaaaaatacaaaaattagccaggtatggtggtgcacacctgtggtcccagtcactcagaaggctgaggtgggaggattgcttgaggggagaggtggagtctgcaatgagctgttattacaccactgttctccagcctgggtgacagagtgagaccctgtttcaaaaaaaaacaaaaacaaagacaaaaaactcttacaactcaaaaagaaaaacaacccaaatcaaatacgggcaaagagcttgaatagacgtatcttcaaaacaggatatacaaatggccaataagcacatgaaaagatgctcaacttcattaatcatcagggaaaggtgaatcaaaaccacctacaaataccatttcacacccacagggatggctatcagtaaaaacagacaaaaaacaggagataacaaatgttgctgaggatgtagagaaattggaatgcttgtgtgttgctagtggcaatataaaatggtttggctgctgtgaaaacagtttggcactccctcaaagaaattaaacatagaattaccatatgacccagcaattccactctaaggtatacagtcatccctcagaactgtgagggattggttccaggacaccctctggataccaaagtctgcagaggctcaaatctctttatataaaatagcagcatttgcagataacctatgcacaccctcccatatacttgaaatcatctctagatcactcatcatgccgaatacaatgcctacacatcactgcattcacgtggattcaacggcccctggcagattcacgttttgccttttagaactctgtggattttttttccaaatgctttctgtttgtggttggttgaattcatggatacggagcccatggatatggagggccaactgtatacccaaaggaattgaaacctggtactcaaacacatacacgcacagccatgttcaaagccgtacttattcacaatagccaagaggtgggaacagcctgcatggccgtcaatggatgaatggataaagtgtgggacagccatacagcagaatgttacttggccgtgaaaaggaatgcagttcttatacatgcaacaacacggatgaactcacaaatacggcagaaagaaggaaagaagcgagacacaaacgtcacgtactatatgactccatttatatgaaactgccagaataggcccatccaccaagacacaatatagatgagtagctgccaggaacagtggcgatggggggaacgggaaacagctgcttactggcacaaggtttccttccggggtgatgaaactgctctggaactagaaggagacggcagtagtacaaccctgtgaatgtactaaatgccactttacttactgtttgctttaaaatcgttaatttcatctcgtgaatttcacctccattcttaaaaaggttggggggatgggggtgcggcggcacttattcactggttgtgccaggaggttttctgatatttggacatacaacggctagccccctctggaatgaatctggttcatccatttagtattcatttaataaatatttagcaagtgctacctccatgctagacgccagacgagaacaaaagcagagccctggtcctgagcttactttcgggtggtagagacacacagacaagtaaacacacatccacatatgtgctacaaaaaagaaaggaacagtgagttagaaaaaagaataaagaagaaccaaactcagatgacaggctttggttaattttagatgtcaacttgactgaattaagaaatacctagaggacctggcacagtggctcatgcctataatcccagcactttgggaggccaaggcgggaggatcgcttgagcccaggagttcgagaccagcctgagcaacatgacaaaaccccatctctacctcccaccaaaaaaaaaaaaagaaagaaagaatgaacgaatgaatagctgggcatggtgacatgcacctgtggtcccagccactcggaaagctgaagtgggaggatcacctgagcccaaggaggtcaaggctgcagtgagctgagattgtaccactgcactccagtctaggtgacagagcgagactccaccacaaagaaaaaagaaaaaaagaacctagagacccggtaaggcattatttctgggtgtgtctatgagggtgtttccagaggacactggcatgtaagtcgggccgaggagggaagactcgccctcagtgtggaccagcaccatccaactggttgggttgcagatgggacaaaaaacagagaaatggccatctgtctctaaagggacaaaaagtcagggagggcaatctctccatctgcctctctccctctgtggccttaggactctggcctcacaccctcagtaccaggctttcgacctcagactgacaattacagcagggtttctctgctgcggaggcgtctgagcttgaggggagctgtgctgccggcaacccagatctccagcttgcaggtggcctgtcacgggacttctcggcctccacaatcacgtgagcctattcccccaataagttccctctcgtatctgggtatctatctatctgtctctcctattgattttgtctggagaaaaaaccccaacaaatacaacaaccaatgggtcaaagaagaaatcactgggagaattagaagatacttttgagataatgaaaacaaaacacaatatatcgaaacatatggaatacagtgtacacagtgctcagagcgaaatgtacagctgtaaacacctacattcaaaaataagagtgacatcaaatcaatgactccttctacaccctaaggaattagaaaaagaactaaactcaaagctaacagaaggaaaagaacagaaataaaatacgcaataaaaggcatagagtgaatcaataaaatcaagttttttctttgaagagatcaactaaattgacaaacctttggctagtatttaaaaaaaagaacataaataacccacatcagaaataaaagtgggaactaccaatcttatagaaattaaaagaattatgagaatactatagacaactatatgccagctagataatgtaaataagacataaccttagaagcaaattactaaaattgaatcaagaagtagggctgggcatggtggctcacgactgtaatcccagcactttgggagaccgaagtgggcggatcatgaagtcaggagatcgagaccatcctggctaacatggtgaaaccctgtctctactaaaaatacaaaaaaaaattagccaggtatggtg[174 bp omitted]ctcaacacattgatatcaagagacggaatcagaaatcaaatacttcccacaaagaaaagtccaagaccagagagttcactgaactccatggaacattcaaagaacaaacaccactcctgctcaaactctaccaaaacttagaagaggagggaatacctcctaactcactttatgagggcggcattaccctgatactaaagccagacaaagataccacaagaaaaccacacagcaatgttccttatgaatacagacacaaaaatccttaacaaaatactagcaaacccaatccaacagcacactaaaaagattatataccataaccaagagggatttatcccaggaatgcaaggcggcagggggttcctacataaaaatccatcagcgtaatacagcacattaataaaaggaagaaaaaatctacatgattttctcattagagacagataagagcatgtgacaaaactcaacacctattcatgatttagaaaaacgtcattcagcaaactagaaaaagaaggtgtgacacggtaagaaatatatatatttggtctctgctcctagtcctggcaccgagctgctaaaacactttctgagagatggtggtgatagaagcctgttttgttttaatattgggtcttagtcctgggttcctgacacaaaggcctctaagatccttgaaatcttggaagtgatacgagcatcttttcgttcgttcatgaggtgtctgctgactgaatgcccctagatagcttcaggatgggggctggttgccaggggaaccaatcatgtgataggtggctggaattttcagccccaccccctgacctcttagggagggcaaaggggctggaaatttagtttaatcaccaatggccaatggtttaatcaatcatgcccacacaatggagtctccataaacaccttacacaaaggggttccgagagcttccaggctggcccgtctgagggcatggaacgtcagcacccttcccacatagcctgccccatgcagcaaggtttggccattactgaatcgcactctttacaacaaaccagtaatggaagtaaaatgttttcctgagttctgtgagccgttatagagaactgttgaacataaggaggggcaacacccgatttatggccggttgagtacaggtggcagtctgggactcgcgactggcatctgaagtgggggctgtcctgtgaaactgggctcttaacctgggagcttgcgctaactccaggtcgtggatgacatcactgaattcaactgcaggacccccaagtggtgtctgtggagaactggagaactgtaatgtctgggaaacccacacagttggtgtcagaaatgttgtgagtggagaacaggtttttccttcttctataagggaatttccttaacctgataaagggcatttacagaaagttcacagctgacatcacactcaatggaaaaaggctggaaactcttcccctgagatcaggaaccacgcgggatgcccaccctctccactgctattcaacactgtgctgcatgttctagccagggcagtaaagcaaggaaaagactttgacgaaagacatccaaactggaacctctatttgcagatgacatgattccatatacagaaaatcccaaagaagccacacacaaaaaaaaaaatcaacaaaagaaaaaaaaaaaacaacaccctactaaagctaataataaattcattaaagctgcagggtacaagatcaatacacaaaaattgtttgtgctgtccagagaggaggtctacaggaaaaacaaaaacaaaatcagctgtgcttctatacacctgcaatgaagaatccaaaaagggaattaggaaagaattccatttacaatag[132 bp omitted]caaaacctcatctctactaaaaatacaaaaattagctgggcgtggtggcacacgtccgtaattccagctactcgggaggctgaggcaggagaatcgcttgaatccaggaggcagaggttgcagtgagccaagatcgtgccactgcactccagcctaggtgatggacagactctgtctcaaaacaaaacaaggcaaaaaaacctaggaataaatttaagcacacaggtaaaagacttatgtatactgaaaactataaaatattgctgaaagaacctaaagacttaattaagtggaaagacattccttgttcatggactgaaaacttaatattgttaagatgtttcaaaaatgactagatacaatagaatccctatcaaaattccaatataattttttgcaaaaatggaaaagtcaaacctcaagttcatatggaatcacaaggggcacagaataaccaaactcatatggaagagggaaaaacaaaacacagagttagaggactcacacttgccaatttcaaaacttcctacaaggctgggcgcgctgactcacacctgtaattccagcattttcggggcccaaggcgaaaggatcg[132 bp omitted]accccatctctactaaaaatgcaaaaaattagccagacacggtggcaggcacctgtaatcccagctattcaggaggctgaggcaggagaatcgcttgaacctgggaggcagaggttgcgatgagccaggatcgtgccactgcactccagcctggacaagagcgaaactctgtctcaaaaagataaataaataaataaataaataaataaataaataaaaagaccagcctgggcaacacaatgggaccccatctctacaaaaataataaaattagctggatgtggtggtgcaggcccgtggttccagctacctgggaggctgaggtgggaggactgcctgagcccaagaggtcaaagctacagtgagccatgattgcaccactgcactccagcctgggtgatagagcaagactctgacaaaaaaagaaaaaaaaggcggggcacggtg[202 bp omitted]gcttgcagtgagccgagatggcgccactgcactctagcctgggcgacagagccagactccgtctcaaaataaaataaaataaaataaaaataaccttcctatacaactacagtcatcaaaacagtatggccagcataagcacagacacgtagaccaatgaaatagaattcagagtccagttttaaaccccaaatctatggccagctgattttcaacaacgctctaacaccactcgatggcgaaagaacagtctcttcagtgaacggtgctgggacacctggaaaaccacatgcaaaagaatactgttagacccccacttcacttcatatatgaaagttcactcgaaaatggatcaactctctacgtataaggactacaactatgaaactggtgtaaataaacatggggcaaatcttcatgacctcatttggcaatggagtcacagatttgacaccaaaggtgtgagcgacaagagaaaacagataaatagaatttcataaacatttaaaacattcatgcaacaagggacattatcagggctgggtgcggcagctcacgcctgtgatcccagctagttgggaggctggggtgggaggactgcttgagcctaggaagtcagggttacagtgaaccaagatcacactactgcactccagcctgggcaacagagtgagaccctgctcaaaaagcagacattatgaagaatgtaaaaaaaaaaaaaaacacctaaaaaaggggaaaagatatttgaaatcacatacccaaaatatttaaaaaacttctataacac[138 bp omitted]atggcgcaaccccatcagtactaaaaatacaaaaattagctgggcgtggcagcgggagtctataattccagctactcgggaggctgagggaggaaaatcacttgaacccaggaggcagaggttgtagtgagccgagatggcgccactgcactccagcctggccaaaagagtgagactccatctcggaaaaaaacaaacaaaaatgggcaatggatatatctagacatttctcgagaaagagatacgtgcagccagcaagcatgtgaaaagacgtgaaacatcacgggtcatcaaggaaatgcaaataaaaacctcaacagttaccgctctataccctagaggatggctataatttttaagaaacagaaaacaagcattgctgaggatctggagaaacaggaaccctcacacattgctggtggacctatgacaggatacagccactggaaaacggcttagcagttcctcagaaagctaaacagaaaattattgtatgagcctgcaattccattcctaggtgtatacacccagaggaactgaaaacgggcactcaaacaagtacaaacacacactcacacacgttcacagcagcactattccccatagcaaatgggtagaaacagcccaaacgtctatccacagatgaatggataaacagaaaatggtatagctgtccgtcattctgtgtagattccatacttttgaatttacctcctcactgaagttcatttgcaaccccaaactgatactgtcagctttcacagtcatttgcagacatgcccagaacagcagaaaggttgagctgcccaacacgcatgttcccagcagatgtcaagcaaggcaacgctgtcgtcttgcttcggaaaaacttcttcacaacacacatgtattactttgcaatcagatgaggccttccaaattctttttccttgagagaaaggagtgatttttctgtaaaaggacatcctaccaacaggtcaaacaaaatgcggcctcagttacgttctaatgcctaacactgcataaagcacaattccttcattatacaggcgatgccatattcaaggtcaagtgcactcgctgaaaaaccctcatgcttatacaagaatagagctgtcggagaaagcaccttttctgctccggtcttagagccacactcgccggcgaagccaaacaacatctttttcatcgcaggaccctcaacctcctttgggccctctgaggtctgaggctccctttctccactgaacttccttgcccagactgactggaaggagccgataccatctcaacaatgaaaggatgaaatgcctactatgtgccacgcgccgggccaagtgctacacctgctgtctccctcttaatcttcctgatgcctgagaagcagacgcagccagaaaccccatcttatggatagacaaactgaggcccagaggagtgtcccactcacggtgacacagccaggctctgagattgaacgctggcgtgtccacctccaaactgcggtctccgcagctctctccctacccagtctggacacaccagcgcctccccaaacccaccccgtcaccaacctctgtttactccttattccacttacctgacctcccaccgaggagtaagccatggctaaccaccaaacgcgagccctggctacaccaggtagaaaaaccaccagcaaacccatgcactatgaccctgtccctaatcgtgttccaaatcctgcagccatgacacactcctatccctggcaccaaaactcatcaagcactgtcattctaggtcatgcctgtctcaggtatttggacaactggtgtgtgtttacaaagagctggttccaatcctagctctgccaacttctgaggcttgaccaagtgactcgggatccaggatctcctccacctgtggacagcacacacaccactgccgctgtgaggaggacctgcatccctggaccttgccgtggggccactggtactcccggtgtaggaccctctacaaccaccccaggaagagagggttcccaggcaatcgggcacatggtacactgaagcggctggcctctgtcctgagagagagggagcgctgcgattctcagcacaggctcatggcagaactccgggcccagctacgcggcttctgcaggaattattcagacaaataaacaccaagaaacatgacttaaaaaaaaaaaaaaaaaaaaacagaaaaactggccatcctccaaaagggctcaatgaaagcacatgctgagatttgaaaaacctgctacatctaaaatgggagaattttactatatgtaaattatacctcgacaaactagacttaaagaaaacatcttaacccaactatgttaccatgggttgctggaagtgcacatgctcctgctgaagggcaccgagggagctggcaccacgcttggggccttccagaggaaccaggcaacaggagctctagaggaacatggggtcccatgccccccatgcaactacatgcccccacaccctaaatgaagcccccaggatcccaaaagagcaggcagggattcagagagggctctctgccctctcgacacccccacacaggggaggatgctgggcccagtagtgacaatcctatggtcaaagggcccccggctccctttatctacagggccaggatgcaagggtggagcttcaggaagtcaggacagaaacagccctggagtctgcatttcagactcagttgagtgctgcaggacacagcaggtaggggcacctgagtggcagccacttagggcccctgctgcactgggtacagtggcaccacacagtatgggtttctgccacacttgggagcggctggcctgcatctcgcctgaagttgcccctactaagcaaggatgacaagcagcaaacagcactggccaggccctgccccacctgcctccgaatccacgggcagcccacggcggagccaggcagcagccggagccccttgcctgagggcactaggaagtagaatggatgccaccagtccccaggtggctgaaggccgtgtcagggaccagacaggtgtctgggaacacagaaaacctcactgagcttgggcacagtggcaagtgcctgtagtcccagctacttgggaggctgaggtgggaggatcgcttgagcctggtaggttgaggatacagtgagctatgattgcaccactgcgctccagcctgggcaaaagagcaagaccttgtctctaaaaacaaaacaaaaaatgccttgctggcccaaactgcttctgaacctcagaggaccttaatctaagtcaccccagaggcgagtttaaactgcccatacagatggtggtcccacagcccacccgctagaataccagtgcctgggctgtggagcacctttgcagatgggctcgagcaatcccctcaaccgccccaagagggggctgctgttctcattccccttccatacgctcaccggatacagctggggagactgggagcccgggcacacacctggcagaggggtggccccataggcccaaaggcagggaccactcacccctcaggaggcccacttgcaggcaggttcggctcttctcccagcggggcctcaattccaacaaagcctcagaatgacctaggtttctgtgaactggaccccgcgcgaggccttgcatctgaaatcggccaagctgcaccggctgaaacgtcacccggctcctaggacggccgcacgccaaatgcctctcctcaaggcccttcgtgccagagggtttgtggaaaagtggaatggcagccacgcagcccggcaccgccaggtacaaaccggggactcagtaaccaagcggggcggcatccacaggcctcccagggacacctccttccccagcgttgcctccatgccgggccagctgcacttgtgggaaagcagccggccatggacaagccacaagccaggaaatgtcaccgctggccctgtggtgacacctgggaggaggagcaggggcaggctctgagttgttttaatcattaggccaaaaaaaaaaaaaaaaagtgaaaaactacagatgaaagaaaagaaaagaaaaccccctggactcccaccacccagatgacccgcgccaacattctggatagagataactcctttttccttcaagtattatatatgtagcttgcttcgttaattctgaaggtcatcaaagattctgcccagaagacgcatcgtaatcggactgtaatcagatatttatgctatttcctgatctcagtcactacacacggcccggttattaaccctctaggaccgtcgaggaagctggccctgacaggggatgtcactgctggcacattttctaggcaactggacaggaggtggcccagcagctcccctagagaagcagaccaagggacacgcccacctgctgtcatgaaaccagccgtgtcctggcccccgacgtccccaggaatggagatggtgaccagcaccccccgcagcactcactggaatgtctgtgcatgggcagcggccagttctctggcctgttttgtgaactgccgtggcacccggagcaggggtccccacagagaggcatcctgcttgctcccctcagggatcctaccttgtttttgaagtgcacctcgatgggcatgatgaagccagcgtaccccgactcctctactttgtaggggggctccttgcacactaaaaagaaaaggaagaaacacacccatcagcctcctgcctgtttcaggcccagctgccagcggcagtaccgcacccctcaaccccaccacctcctcacaggggcttggctggcctctcgggggtggcttttcaggaggttaagcccccgacaggattgacttccacggcaaagttatcttaggaataaaacagcagggaagaagaggagaaaggagacttggccaccggcatggtcagcagagagtgagaaggaacgttagcctgtcatcgggatacttgctcctgcagaggatgaggaggctgaggccagagaaggctgcacaagtttgcccgactcaggtggatgtcggtaagcgtgacctgggtgaggtgtgaaacccagcagggagggccacacactctactgtcaccacctccagcacgggggctgagcacctgctgcaccacggacacatgcactgggagacaggggagccccaggtggctgggaccctcctcctgggttctagtttagcacctaataagagcattcccaagtgacgcaaacaaaaccccattgaccccagagattaaaaaagaaaaaaaaaaggccggacacggtggctcacacctgtaatcccagcactttgggaggccaaggcaggcggatcacttcaagtcaggagttcgagaccagcctggccaacatgatgaaactccgtctctaataaaaacacaaaaattagctgggcgtggtggcacacacctgtaatcccagctactcaggaagctgaagcaggagaatcgcttgaaccccagaggcagaggttgcagtaagcggagattgtgccactgcactccagcctgggtaacagagcgagactccatttaaaaaattaataaataaacaaagtgcagcatgaggccaggcacctgaatacttaatctgaacctggggaggaaagcggaggcagaacagaggaagggtggcctgtccccagcagaggaggcacgggcatgggcagtggcctgggatttgctctcagactccacccatgcctcgtcttctccccactcgcccatagtctgaatcccacccagccacaaaggcccacagcagggccacctccttcgagaaacagaccccatgtccctctgcctctgacctccaggtcacgtgcttcccaaatcgactgtcacatcttatctcatggtccccacgccttcaagaaggaatcctgtcctgtgacgggtactccaagcctgaagaacttctatccccccagacagcgccaagagggatggcagttggccgagtgcttcaattcaaccaggggagaacagggagacgcaccggcccactctcctgcctgagagcccacaggaagcaagaggacaggaataaggccgtgagagtgaaggcaggagggaggagattcaagccacctgccagtttctgaaaggcagaagtcggacgaggacacgatgggcaaggggcaggacaaggaggcgacggctcagagtctgccatgggggcgccgcagggcagggacagccactggtgccagaaggctgaaggtcctggactggctgagcggagggcaggagtgaggatgaaagctgggggagggaaagggagcacggtgggggaggagggtgggagcaggggagcgactgccactgcggggcctgagcttctccctggggtgacagcaatgttctggaattagacagcagtgatggaatcagtggtcatggccgcacaactatgtgaatatactgaaaacgctaactgtacacattacaagagtgaattttatgatgtgtaaattacatctccataaagcggttattaaaaaaaaacaaaagggcaaactgaaaggctgtgttgggcacaggagccctgggatccctccctcctgcccatcctccttcccgcccattccccctccacccctccccaccccaggaagtttcaggtttccctctggagaaattgagatggttctgtgtctcaaggagccaactatcagggggaagctgaaacttgcagcgtggaaaccagaccccgaggaaggccttactcattaggaaatcaggaggcccgtgagccttcaggcctgtggataggcagaacccaccctcccatcacataacgctcaggagctcccaccaggaggaaagagcccgagcaaacaaataatttggagaccacagagagtttgacaaaaagaaagaaaaaaaataaaaaccaagagtcaatgtcctcagattcaaggagatatatatccaacaaataaaaataagatacttctaaaaggggaaattacagccaggcaccacagctcacacctgtaatcctaggcactctgggaggccgaggtgggaggatcacttgacaccaggagttcaaggccaacctggatgacattctctactaaaaatacaaaaaattagccaggcgtggtggtgcgcacctgtaatcccagctacttgggaggctgaggcacgagaatcacttgcacccaggcggtggaggttgcagtgagccaagatagtgccactgccctccagcctaggtgactgagcgaaactctgttaaaaaaaaaaaaaaaaaaaaatgaggatcccagaaagaaaaaaagagaggaaataaacagatggaaggaaactgtcaaataaatagaaggaaactttcagagctaaaatgaaagacactcaaatgtcacaaaacatagtgaacagcaaaaaaaaaacaaaaaaacaaaaaaacaaaaaaaaacatgatgtcataaagcaagcgtcctaaaaacataaaaacatcctaaatgtttccacagaaaaaaacaggtcacatataatgggatgaggaccgaatggcatcagactttccagaagatactaacacaacgccttcatagcactaagtgatatatactcccaaaatgtttgggagcaggagtgttgtgaatttgggatttttcagactttggaatattcgcattcctctggttcagcatcccaaaaatccaaaatctaaaatgctccagtgagcattttctgagcatcatgtcagcactcaaaaagttttggatcggctgggtgcagtggctcccgcctgtaatcccagtactttgggaggctgaggaaggcgaatcacctgaagtcaggagttcaagaccagcctgaccaacatggagaaaccccatctctaataaaaatacaaaattagcaaggtgaggtggtgcacgcctgtaatcccagctactcgggaggctgaggcaggggaatagcttgaacctgggaggcggaggttgcagtgagccaagatcgcgccattgcactccagcctgggcaacaagagtgaaactctgtttcaacaacaacaacaaaagttttggatcttggccaggtgcaatggctcatgcctgtaatctcagcactttgggaggctgcagcaggcggatcacgaggttaacagattgaggccatcctgaccaacatggtgaaaccctgtctctactaaaaatacaaaaattagccaagggtggtggtgggggcttgtagtcctagctactcaggaggctgag[132 bp omitted]tcacgccggtaatcccagcattttgggaggccaaggcgggaagattttaagcccaagagttcaagaccaacttgggcaacatggtgaaatcccgtctctgcaaaaaataaaaaagttagctgggtatggtggcgggccagtagtctcagctacttgggaggctgaggcaggaggactgcttcagcccaaaggtcaaggctgcagtaagctgtgatcacaacactgcactccagtctgggtggcagaatgagattctgtctccaaaaaaaaaaaaaaaaaaaaagttttggatttcggattttcagcttagggattcttgacctgtaattcccaaaccacaaaactacacccaaccaaccattctactgtgagaagagaataatggcattttcaaacatgctaggactcaaagggtttactgcccacgtcttataaattttttttgtttgtttgtttttttgagacagagtttctctctgtcacccaggctggagtgcagtggtacgacctcagctcactgcaacctctgcctcccaggttcaagcgattttcctgcctcggcctcccgagtagctgggattacaggcatcctcactgcccctggctaactttttgtaattttagtagagatggggtttcaccatgttggccagactggtcttgaactcctgatctcaggtgatccgcctgcctcagcctcccaaagttctgggattacaggcatgagccactgcgcccagccagaaatgtctgaagtaatctcttggaatattacttgagacactgctctaccaaaacaagaaaataaaccaaaacacaggccgataaacaaacctcaggagaacaggagagaaaaggcccagggtagtggctaaaggggtggctggataagagtccgttgtgattagagaaggaaggcacagagaaccagcatgaaacactcagaggactttacaaacaagccagaaagccaggtaaggcggctgacacctgtaaactcagctactcctgaagcagaggcgggaggactgcttgagcccaaggagttggagttcagtctgggcaacacagcgacacccccatctctaaaagaatttttttttttgagacatagtttcgctctgtcgcccaggccggagtgcactggcatgatctcggctcactgcaacctctgcatcctgggttcaagcgattctcctgcctcagcttcccgagtagctgggactaaaggcatgcgccaccacagccggctaatttttttgtatttttagtagagaccgagtttcagcatattggccaggctggtcttgaattcttgacctcaggtgatccacccgtctcggcctcccaaagtgctggcatgaaccaccgcacccggccaaaaaattaaaaaaaaaaaaaaattccacagaataaatgaaatgactgagagaatggggggaaaatgaaggtatgctaaagacacaatgcaaaaaggagaagtaagggggtattccaaaagccacagaccaaatgtgaagcaagctaaaatagggccaaattttaaccaaaaatgaccaaaaagaacccgtttcacacagacctgactttgagccttctctctggagtggcccagagttcaggacatgggaaacagaagctgaatgaagtcctgccgtcccaaccagcctgatggtgacagcgtcaaacatgtcaacgccgcctactgctagttcccaactcttacagtcaatctataatcggggagcgaaggtcttggtcttcgtcaataagcttaacaacgtccattgtagcctcaaaaagaggggtgcagcagggtcaaaaagagacagggtactggtggccttgccctcctcagtggagagtcagaaaacactaacaaaagctgaccaggtgcaagggtccatccagtcatcaaacacttagtaagcacctactgtatccctgcaggcaccgaacatgtagcagcaaacaaaactgacagaaacctctgacttggggtggggagagggatggacaagatgaagaagtcatatgtacgagatgttaagatggtgctaaggagaaaaccaaagcagaaaacaaaaaggctaagaagcatatggctgtgtgggtgtattgggcaacgaaaccgcgattgagcccaggcagccagaggactccctaaaaagggtgacgtgggactcttctgtgaaggatcccaaaggtaaacaggctcacatcatcattcaaagtcacaaagacaaccaacgcaaaagcgagtcactggactattaaaaacttagagaagacagtggataaaaggggtactttgggataaattctaacccttcaagctggtaaatcagtaagtattgtctacatttaaaaaatcaagaaataagaagcaaatgagctggtattaagaggagtccagagagggctaggaagacagccccggggagggaggactaaggaggccaggaacagcaactttgtaccttacatgtttctaccctatttgatttgtgataatgtaagctggggcggaagtaaaagatactttttaagtacctcaagtatcaatccagaggctggagtgctctaagaggttcactccctctctaaagttttattcaatgccacagagtgtgagctggaaatttactttctgatacatttgatggggccgctatctgcctccaggccccacagacagacagcaacaaacagggctcagctactaatttaaaggccgcctgcaaactgacactgaagcctggcatggtggcacatgcctgccaggagctcaagacaagcctgggcaacacgacaaacaaaaaacaaaacaaaacaaaaaactaaaaactaacccttaagagtgagccccactcactaccccaccttccaggtacttggagaaggtgccatgtcaacgtggtggggaacaaaggtgaaatcaacagcctcaaagtggatggaaatcagcgtccggggcccatccctgtgctccagggacagagaaaaggggaggggtgagggggttggtgaagaagtggagtggatgccaccagagaaaggaaagagggcctggtgcaggaggggcagccaggctcctgctctgccaacgtggcacaaaagcagccacaggcaacacctatgcgggcgggcatggccgtgcaccaataaaaacaggctgcactggcagtggccagacccagcccacaggccagcctgcccaccctgctctaagcacaggtagcggcctgccccctggacccgtctccccgtctgcagaagagggctgtggcgagaagaaaacgcgatcctgcgcacgaagcgctggccaggaagtgctcgatagatggcatgtgtccccacgattaggaagcggtttataaacatctgccgctgtcaggagcctccgcggccatcctctaagaggcttagagagggaggaaggaaaaggggaaaaggtgaagactcaggaaaggagaaatgcagagggaaagagaagccgcaggctgagggaatcgcaggtgggcatcccttcagaatgacaagcctctactgctgtcaacgcccatcacttccccactaggctgcaaaccacttacaggctcagggccagggtcctgggtcccgggtcccgggaagctcttgcttcaacctaagcacacccacgcttgtgcacggctcacctcccgtggcccctggagctcccgggacccccgtattgcagggtagaggggtcaccagcccagccagggctcttcccaccctgaagtgcttcctacagaaagtccctcattcctttatcaagacatcacccaagaagcatttatcgaacccctgtgatgtgccgggctccgggcttcacactggcgactcagcggtaagaaaagtagacgcggccccagccctgatggcgctcaccagaccaccacctcactctccgattccccaccacagcctttccctagggctcacttccccaggagggcatccctgatcataaactgggtgacttcctgcctgtgccccgtcacactgcaccctccaggaaggccagggcccccacgccacaggtggagacgctgacagaatacacgactgaggcactcgtgctgaatcaatgacggcctgaggcttgaagggagagggaagacacggaaaagacagtggtgacatgagctccggcattctttctgccccaaatattgggaattcttcacatggcacacaaacaaacataggcccggtcggcaacttcctgatcactcaccagccggctgacttcacctgtcccacccatgccaacctggctgtgctccctggctgcttcccagagcccgggtctaaatcacgacacaacagaccgccaccacctccttcggttcttcctacgactaactcaacagctggaggtgacacggctccagtgcccccacgccgagggacgcaagctggaacctcatggttggaggggtcctgctgctcctgagggaggggtggagcctggccttgggaggagtgaagacagatgggtccgtgctgtgggcactcagggcttgaggccactcaccgcgtctgggcttggggaagctgtcgtgcagccagaagaccaccttctccacgaagtgctggatgtcacattgctcggggccgcggacaaacaccatccagtcgtgagtgaacccctccgtggtgggcttcttgcgcagttgggcgcgatgccccagctctaacctcacctggacggtgcactggaggagagagaggtggggagatgaagtcagcacacgcctccaagcaggggactgtccccttacccacagagaactttcgataaagacccccagcagtgcaatacgctctcaacccagtgagcagcacacagacggcttcctatcgcgccagcaccttgccgcagacgtcccgtgccttctcccctccgtactcccacacagaccccgtgtctcctctcatccaccgcctcatcctcaattccacccgcacagcctcctcaccggtccccagctcagcccagctcactcctgcctcggggccaccacactggcctaggatcctctgctcctgagacttcccacactggcgcctcttgtcactgggctctcagcttgactgtccctctgcagggaagcctcccctgaccaccgatccaaaagcatccaccaccgctcccatcactctatcatagaggatgctcttccgagcactttcactatcaaaagtcatcttgctgatggctgtcggtgtctctgccacctaagcttgttgactccagcattttcattcccaagcacgcatcacagcgcctcccggaggcccctctcctttccctaagtcatcagctacaacactggctttcagtttcaaaagcagaatgggaggttcccaagaagaaggcagaggccagcctgcggccccctggtgaccggtcccaggtggacccgtggcctgggcagcccagctccctccgctgagcacatgtcgtgtctgacactttgctctgaaatacaaggcagctcaggccagttccatgccactgaacacaaagttgcatgccttcaaagcactcttcatacctaggttggccaaaaccaccaacagggaacctacagtaaatatccaccctgctttgtaaaaacctccccagacttttcacagatacggccctgacacccgctatcaaatacaagaatgttacaaaataaagcagcagccaagcgcacacttgcttctaagtgctgagatagccgggagccagccagaccatggcctgagtcccacaccctcccctgacagagccgccctcccgggccccagaccagacagctcccatctgcgcctttccacgccatcgctcggcaactggccaggtgtgtcccagtggctgcaatccctccagtacctgtctcttctttggcatttcgaggccccgttcagaccccgccacctggctgagtgccccggcgcctggccggcttccctccctctccgtccccctctgagctctcagttgtcacgcgatggagccgctggggcaggcagatcctatcgcccccacccccgcccgccatgttaaagctttccacggcttgtcactccctcagaaggaagcccgagccccgcgcacgtcttccacgcgtgtatttcctcaagtctgagacgctcgtctcttttcatgtcctaacccttttgaagtcagagtccagcctgcacacaggcgcacacgtgcacacacagacacagaagctgctcctgagttggtggcgctgtcctggtatctcagagtcccagaactgaggaaatgcaggaaacgcgcacattccagctcaatcctacagccagccccagacacaccaggaacagccaccctatctctcttcatctcttctagtgccgcagcctgggtgccctaagctcgtttcaaaaccctactcatctcaagtcctggctcacacgctgccctgtccagggccctttctggtagccacgctggagaccaaccttgagtccccacagaagcctgtggacagctccacgggagccccttcatcccatcccccgctcctgggttgctgacgcagcccccagggcccctgtgaactctctgagagcagggactacatcttgttcgtcctcttagcctctatcttgaaaccacgggacaggaggcctggacgatgctggattaattaaaccagagagcctctcaggtcagggagttctaaatgctgcttttggagacggcagggccatggtggcagataaggacaggccagttccagcatgtggaagaactggccagagaggctgagggtctgtgcgcacagcaagccaggtataagaaatgaggcggaggcgtgcaatttctatttggcaacttaaaaagtaaactgaaacatgtacatgatacagatgtacaatttttatttgtcaactaaaaattaatttttaaaaggaaagggggcagaggggattcccttggctcaggacgactgtccctctggagttccctgggaaaagagggcagggactccctagggaccaggcacactgcagggggtgcctgggatcaggccggagacaaaagaaataacccgtcgtcataagtggctgacagatatgggaaacggtctcggagtcaaaagcccccggccctctgtgtaaggcctggggtgcaggcagaaaagggcgaatggcaaactaacagcaaccccagcccatgaggaggcaaccagaaggagtggctggaaaaaggggtgaacacagcccaaagccacagaactgacaggacccgagggtggaggacattcaggtaaccccaagatccgggcagcagggacattcacgaccccagtgtgggaagaaagtggggatggacggaagatcaggcgcactcataaacccccggcgctgcggattcatgaggatctcaggtaaaagtacccccaccaaacacacgaggtgagggctgagcaccggcatggcaatactcaggccaagcacgagtgtctgcctgaacaccaccgcattccaacaaacccaaaacaacactgacattagccccgagcggccatgaccaccctctatgcttacacgcctgcgcctctgcctttttcgctagaaaacaggaaggcaacccctgtcccgctgggagcattacaggtgaaaactaaatgtacatatacatcatgggaacagcaccaggatgcgggagaacgacccctgcttctgtggagctgactcccacacaatgacagtgtctcctcggaatcgcttattcactgacccggccactcagacctcggccgacttcccggcatttctgatgacagggagttcctacccagggcacgcaggcggcagagcagttattgtgaaagagtgaaagaccgcggttccactggagagggggaggatggaagcaccagaactccaccgcagtggccaaagtaaacaggaaggttccgaggcagcgatgggtaatctttgcagccggcaggccgggcccaaagtgctgcccaggcgacactgatgccctgggggctggcgccaacttgagcctcaacacccactgttaaggacacaccccagacttggccaacagatgcgaagttcgggtgcccggcctgctgcacccaggggactgtggagcgctgaggggggcactccccggaagggtggaataacagagtctctgctgttgtagtaaaaaaggaatcacagattcagtaagacgctcaagccacgtcaacgggaggcaagaagtggagccccggccaacgcgtttgacttgtcaggtcatgataatttattagcacagctaagccaattccatagccaagggtaaccaccccccttcccccacaccacctggactctttccttggccattaggaccaaagaattgaagctaatcaattagctgtctctctaggaagggtgcctggctgcagaggttaagtgacaggctctccagaatgtcttagagtgaataatctgattggtcagtggctctcccccaactttatcccagcaagttccttcaaggcaccaggaatgcctgctgctgggaggccacttttttggaacctctggaatagacggctggaaatgagccggggggctgtggtctcagggatttccacttccctgcacctctgggaccaccctgacacccactccccaacaaaagcccaggataaaggggaaccttccaggactgtcccggaaagagctgtccgtctcacttctgggaaaccatctgaaagacagcggacggagggatgggcacgagcgctccaagggccatctggggacagttaggcttgggcagagggcctcagctgggacactgccctctctccaggccagctggcagagggcacttggaaccaaagggccaaaatcccaaatcaggcaaaccaggcagcctctcgagggcagcttccccggggctttctcaacgcagcgtgcggttctccccaggtgtgggctacagcggccgccgcctggcaaagagccgcgagccagccttgttccaacagcttcacacaattccttcagccaatgtaccccacttcctgcaagccctgaaggcaggtcttcaacaaccagttcatctgaagatttcccctggtcttctggtgggaattctcaatagatgcccttcctctgggaacttggacttcgcccagtggtggaattacacctggagttcggctactgcatctaattccctcggaggcaacgatcccctcccatcccaggagaggagaacactgaggagtcgtttcccccttcagcctaaattgattttgaggtcctcctgggctgaacacgtgcacgtgtgtgagccacacatgcacaaacaggaagaggtgacgaggcttgggcgatcccatggagcgacggcaacatgagacccaataaaaccccctgcggaatcttctcccgccaagcccagtcggggccctcagtggtaaccactgaattagaatgtaagagatggggaaagacaggtgcccctctgtgacagtcctctgaagcggagagctgcccacccagaaggcaggggcctctcactaacaggtacaccgggtcctggtcccctgactgctggcacactggggctaggggccagcacctccacccctcttctggctccatctgtcctcgtccctctgacccaaggcacaatgacaaagcgatgagaaggcactcaatgaatttctctctggaaactctctaagagtggtgtgtagaccacctggaaatgcaagttcccctttatagggtctgcagattcctggtaagactgactctctgaccacattgtcaggggaggcctgggacagagtatttacgaaccaggggcccacagacgtgtagacagtgtaccggctatctcccacgttctccaggggggagggggaggagccttggtggactttttgaatgtgcacaaccccaatacaggcatctgtcaccagaccaggtgggcctggctgcaaagggactgattcctagttacttgtatttaaccagcagctggcaaagctgagtgcaaaacctcccattacgaaccacaacgggcataaagggaaatgggactctggtccctgccctcaactgcttcacaatataatcactttaggacaaaaaaactggcaggtcagctttccagggagtagcttcagagctgggagcaggtgaggaatctgtcacacctcagccagcaacctgggtaattcggagcttttcgggcaggtttggggagcagccgagttgcaggaggaagagtctacccacccttgcctgctggtaggacttctgagcctgcatttccacatctgtgaaatgggcccctggcatcagaaacaaactttccccgctgaagaacatcgttgtgaggcagctgctctcaaacccaaacctaggagagcatctgcaggaccagcaagcagcaattcgagcgtgggggtgctccctggtccttttgaagaacgtgaccgcccagatgctgacaccacctcccagctccctaggcagccccagtccccgtgacctgctctcaggccctttcccaatctcttttcggcatctgctcagccttatccttgtcacgtcccagtcccctccccccggccccagcccaggaaacaaaccacactccttccagacataacccttaagtgagcagggaactcgctcatccccctgccaaaaaaaatacaaataccacagacaacaccagcacagacttggggcggagggggaatcaaacatgcgggttacggttggggcaaagagaaccagaaaggcattttcctggccataaggaaaagatgtcaatgctgagaagctgggagcccagagcacagtgggaaatcctgcttcttaggggggtctgaaagtcctagagagtaaaagaggaaggcaaaaagagaatcaaagcctcccaaagccagcgactgggcggaaagctgtgctgtttcccactataatgaggcactaacattttgtggcatctggggggctagtgggagcggaagcccgggttctgctcgattcaaagcattttccctgtgccaagagtcccgcagggacactgaccaccaactcacctacttgagtaaaagataccattctctcctgtttccccaggggcctccggctctgtgaggaagggacagaacccttgggcctctctcaaatttgcatgaaagctttgctggggaagctagaatcagactttgggtccaaacacacttccctccaggagcagcttcccttgcaaacacttctgcaaggagggagaccatcaccatcgacggaactttctgcgatgatggaaatgcatctgcattgcccgacagggtggtcagtagctcagtagctcagtaatggtggttactgagtgcttaaaatgtggctggtgcgatggaggaactgaagttgtcattcgagttagtttaaatgtaaatcagccacagatgctggtgactgtggtaccgggcagtgcaaagccagctctctcccacacctgtccacctgagtgagacctttatctccctctgtcgcagaccaggaatgccacccatttccaccatcccacttacataagtgacagccacccagacctccagggttccacacatcacaaggggaacagacacgcttcggcctaggacatctcccccagggactaaggaaggaggaaaggggccataccctatgcctctgtgtgcccagcgggacttgcctggaggtgggcttcattgaaagtggacactaaaggtatatttcatttgggtttttaactcaatacagattggaagcaacaagctctgtcccttcaacggaaatcaactcacaccacgccgtggaaatccaccaatcaactgctgcaaactcttccttacctcttaagaagaaggcagcaacacccaaaccagatgggaagccatgggaactgggtgccagaagcatgagacacctgtctccatgaccctgtgccacaggcgccgagatgggcaggagggaggattcttgccccccacccatgaaaccacacagacagtgccacttcagtggcgccagcagccagggacgccccaacctgccctctctaacggcggagattttggctgccacccccacagccccacaacacctttcctggcctggtgcccctgaaagccagggcagcagaggaggaggaagaaatgatcccatgttgggggccagcaatgcttctgggcttgaggaagaggggtaggggcttgggtattggagaagaggcagcgcagagttgggtaaagggggtgccagggtgcaggaaggcctcgtgtttatgagaaccaacacagaccaatggggaggggccgtccagagcgtttagggaggttggggaacccacccacccaccctgggtttcaactgaggctctaagatcctgggggaaaaaaacagaaaatgaggtggaaggagggagagggtagtggctgaaagagacatcaggactcatcaggctgatgggcgttagatgaagtgggagatcctgaaggcaaaggttgtacaggagactgcaggactgtgacgtgaccaaccagcctgggagggagatctggactggggtcaagtgtggggaagcctaaatcaggatcccaggggcggagagggcccaagctgaggggaacagcaggccatcagtgactcaaaggtctggggaatccaggtcagagaagaaactgctcctggtcctggtctcagagcagagggtctgaaggtgaaagagacagccccgccgggtccgagggagagtgaccagggcctgaaactagaagggggctgaggcggcagggtgggtcaaagaaagaagtctgaaaaagcaagtacaaagagaggggacactccaaacaggcctgagtccctgcagcagaagaccgaaggccagggtcctagggagtcagaggagctcaggccagggctggggttgggagagaaagggatgccctggctgcagccggggcaggatcagacgggagagaaggctcaggtccaggtaggggatgggtggagataaagcttaggctgggccggggttcaaggaagagagacgccgcagagcagggtcccagggggccggggacgcctcatatctgagctgaggttgaagggaagacagacagcaggttggggactctgggagtttgaggcgactcggggacaagggtccagacaggaaaggagacagtgactggccctggacctagagacggaaaggtctactgggcagatccgaggggccccgggaggggtctgaacagggcccagatcccaggaagtgcctggaaggagctctgggccaggctgaagtcccgagagctgtcttgaggtccctaagccgggctggggtccccaggggcgtcccaggtggatgcaggtcggactggcgttccgaggggtctcccgggggtctccgagccaggctggggggtcaccaggggcgtcccaaggggctccgggcccggcccgggtcccgaagggtgtccgaggcgccctggccggggtcgcggatgggggaggggcgcccccgccccacataaaggcccgaggagcggcgggcgcgcacaaagcgggcgggcgggcgcggagcggggaggccgggaccggggagggccgggcgggccggcgggcgggagggggccgggcgggctgcgcaggggcggcgcggccgctcctcacctgattgtccatggctggcgccccgccccgcccccgggccccgcgtcgctcgccgccgccgccgccgccgccgccgctcaacgccgccccgccgccctcattgtctgtcaagcgccgccgccgccgccgccgccgccgatcccggccgcccgctcgcccgccagccccgcggaaccggaaaccaccgccagcccgggtcgcgcaccgatcacgggcccccgccgccgactagggcccgccgcatcgactgacagccacctgggccaatcgacggcgcggacggccgcttgtggcgcgggacttcctgcctggcgggggcctgccgggctgcggccggagggacgaagcccgcagccaatgggaggccgggaccggaggggcgggaggagggagggagggaggcgcgaggcgagcctggcggaggggagcgcgaggtgtgcgccgcacgtggaggggggcgggggcgggacgggcgcgcggcgcctgcgcgctgcggcccgcagggggcgctgcctcgtggctggagcctccagggcgggagcgtcccgggggctggaactgaggttacgggttcgagccctgtggagggatcccccagcccccccggtagggacacttttgtttcctgacctcatgatgctgctatgtaatggaacgagccctgggctctggaactggagattaattttcttttcttttttttttttatgagacacgtctcgctctgtggcctaggctagagtgtactagcacgatctcagctcactgcaacctccacctcccaggttcaagagattctactgcctcagcctcccgagtagctgggattacaggagctcgccattatgcccagctaatttttgtatttttagtagagacggggttttgccatgttggccaggctggtctcgaactcctgacctcaagtgatccgcctgcctcaacctcccaaagtggagattaattttctaatcttgcataatccttggcaaacctggtcagccccttcttcacctttccctgagtctcagtttgtgcatctgtgaaataggttgaagaacagtactgtgtgattcttcatgctaatttgaatgatacaaatttgaaatcgtgctacattcaaatgacccaagagagtcacatgttttcagttagacacgaagaataagttctggcgatccatcacacagcaaggtgactacataataatgtaattttatattttaaaattgctaaaagcggccagatgcggtggctcacgcctgtaatcccaacactttgggaggctgaggggggcggatcacctgaggtcagaagttcaagaccagcctggccaacatggtgaaatcccatctctactaaaaaaatacaaaaattagccgggcgtggtggtgtgtgcctgtaattctagctactcaggaggctgaggcaggagaatcgcctgaaccagggaggcagaggttgcagtgagatgagatcatgccactgcactccagcctgagtgacagagcaagactctgtctcaaaaaagagaaaaaaaagaaaaaaaatgctaaaagtggattttgaatgttctcaccataaataattgataagtatatgtggtgatggatatgtcaattagcctgatttgtttattccataatgtatacatgtaccaaagcatcaaggtgtaccccatacatatatacagttattatttgtcaataaagattttttttttgagatgaggtctctgctggagtgcagtggcacaatcgtggcgcactgtaacctagacctcctgggttcaaacaattctcccacctcagcctctcaagcaactaggactgactgcaggctcatgtcaccacgcccggctagtttggttatttatttatttatagaaagagcgatctcactatgttgcccaagctggtctccaactcctggcctcaggcaatcctcctgccatggcctcccaaagtgctaggactataggcatgagccactgcgccctgaacaaagatataatttttaaagagagaatctcatgttatccacaaaattttaaataatacccatctctcaaaaaactgttttgatttattgaggatcacaaaattttacaatgacctgtaaactgtgtttatgtgggaaataggcataaccccattttttcaggactttataagccacttgtctcttggacattaggacttctgcctgtgatttggggatccttgtgcagttattttaattccttcttgtcattaaaaatcgggttgtcatttacaagaaagaaacaaaccaccccattaaaaagtgggcaaaggacatgaacagacacttctcaaaagaagacatacatgcggccaataagcatatgaaaaacgctcaacatcactgatcattagagaaatgcaaatcaaaaccacaatgagataccatctgacaccagtcggaatggcgattattaaaaagtcaaaaaacaacagatgttgtcaaggttgcagagaaaaaggagcacttttacactgttgatgggagtataaattagttcgaccactgtggaagacagtgtgacgattccttaaagacctagaggcatgaataatgttcaacccagcaatcccattactgggtatatacccagaggaatataaataattttattataaagacacatgcacgcgtatgttcacggcagcattattgacaatagcaaagacgtgaaatcaacctaaatgcccatcagttatagactggataaagaaaatatggtatatatacaccatggaatactatgcagccataaaaaggaatcagatcatgtcctttgcagggacatggatggagttagaagccgtcatcctcagcaaactaacgcaggaacagaaaatccaacaccacatgttctcatgtataagtgggagcttaatgatgagaacacatggtaacatagtggggaacaaaacacactggggcctgtcagggggtgtggtggggggagggacagcatcaggaagaacagctaacaaaggccgggcttaatacctaggtgatgggatgatctgtgcagcaaactgccatggcacacgtttacctatgtaacaaacctgcatatcctgcacatgtatccctgaacttaaaagttggattaaaaataaataacccctctttaaaaaatcagattgttggggcacacgttgttgggatctcctgtgagctgtgtcatgggcaaaaagtgataaaattgtttaaaaacgaagaaaaaattgaggcgggaggatcacctgaggtcaggagttcgagaccagcctggccaacgtagtgaaaccccgtctttactaataatacaaaaattagcctggcatgatggtgggtgcccataatcccagctactcaggaggctgaggcaggaggatcgcttgaacccaggagatggaggttgcagtgagccgagattgcgccactgcactccagcctgggcgacaagagcaaaactctgtctcaaaaaaaaaaaaaaaagaaaagggaaaagaaagaaacagattgttttctcacttaagtgtcagtcaaacatttattagctagtggggccagtgtttgcactgaagaacaaatagcaccagaaaatgagtaactttggaatgaaagtaagtccagataaaaactctaaagaaggtcaggttgctgtcatggtaataccaccatgctttttaatcaagggcaggtggtgctggaaagaaaaaaaaatggagatcatgctgagaaaataagcagtgatttaatgttgataatttttttttttttttttgagacagggtcttgctctgtcacccaggctggagtgcagtggtacaaacacagctcactgcagccttaacctcctgggctgaagcggttctcccactcagcctctcatgtagctgggaacacaggcatgcacctatttagatatgcctatttcccacataaacaccacgcccagctaacttttaaaattttttgtagatggccaggtgcagtggctcacacttgtaatcccagcactttgggagtccaagacaggcgggtcacatgaggtcaggagtttgagaccagcctggccaacatggtgaaaacccatccctactaaaaatataaaaattagctgggtgtggtggcatgtgcctgtaatcccagctactcgggaggctgagacataagaattgcttaaacccgggaggcagaagttgcagtgagctcggagccagattgtgccgctgcactccagcctgggcaacagagtgagactgtgtctcaaaaaaaaaaaaaacaaaaaaaccgtcttgcccaggctggtctcaaactcctgggttcaagcaatcctgctgcctcagcctcccaaagttctgggatgataggtataagccactacaccgggccgtaacggactctcgctctgtcgcccaggctagagtgcagtggcacaatctctgctcactgcaagctccgcctcctgggttcaagccattctcctgcctcagcctcctgagtagctgggattacaggcattcgccacgacgcccggctagtttttttgtatttttggtagagacagggtgtcaacatt[135 bp omitted]agatcagttgctctaagtagtccccaaagcagcagtgtgagcatcacttgggtatgttgctataaatgcacattctggtcttcccccacccttgtttatggaaccagaaattctaagtgtttggacagcagtggcttaaccaaccctacagatggttccaaggctcacctaactttcagaatcactgtcccaggtaaagggacaaaatgggagtcaggggtagccatctatcttttttttttttttcttttttttttttttgagacagagttttgctctgttgtccaggctggagtccagtggcagtctcaattcactgcaacctccacctcccaggctcaagtgttcctcctgcctcagtctcccaagtagccaagaataaaggctcataccaccatgctcagctaatttttgtattttcttttttttgtggagacagagtcttgttatgtttctgagtctggtcttgaattcctgggctcaagtgatccacctgcctcagcctcccaaagtgctgagattacaggcatgagttaccatgcctggccagcatctgtctttgaagaaagcttgcaggaaagaacctttagtctacacttgctacaaatatgagcttctggaactcaatcccctcccccttattcagttgggaaattactgttcacttaggttctaaattgttgggaattttcaaaactgcatcccctgggctcccactggctgaggtggaatactttgaacatcgaaaagaataatggggaagggccgggtgtggtggctcacgcctgtaatcccagccctttgggaggctg[259 bp omitted]caaaaaaaaaagaaaaaaaaagaataatgaggaaggaactgaatgtctactgacacatgagcggataaactaaacatggtttatccatgcaatagaagcttattcaaccttagaaaggaagaaaatagggtgtagtggtgtgcacctgtagtcccagctacttagaaggctgagacaggaggattgcttgagcgcaggagtttgaggctgcagtgggctatgattgcactgatggcagtggctggccatctggactggccaccaccatcttactagctgcagcacagaggaatggccaggactgcatgttccatagatctggcagaagctggtgacaagtgggagccccgccccttctgcattggggtgggagctccctgggtggtgctgcagccactaaagccatggctacagacctgggcattactgggctctcaggcccagaggcaggcaggagccccaccctcccaggtgcagctgcagctgtccaaactgcagctgcagattaggagtccctgcactcctaggggcccgggaaggttccccctgcccttgcaggctcagaaatgtctgcttccactgcttggcttctccctgctgttggtgcccactccatctcaaagcaaagttggggctgagccccagagctgttgcagccaggcagggtgtgcacaaacttggggcagcacagacacaccagccccctgctacctcagccccatctggacttcgggcaccaacgagcataggagggaagccaaagggggggctgagggcagctcagtgctgacctgcatgcgccccttggcacctatagcctgggcaccatcaacagcagcaggaggtagacaggttcctggatggaaggggatgggtccctggtgaggccccaccttcaggccagggagggcctgaaggctaggggctgggctaccagccccatggactggagtggaaacatgtgatgccttttccaggcctgctcatggaccaatcagcatgcattttttcccctctgaggcccataaaagccctgggctcagccaaagctgggcagatatcgggatgaccagcttcagagagcagctaccaactccagggcctcctctctgctgagagctgcagagacgtcgggactaccagctgcagagaggagcaactcactctaaggcctcttctttgctaagagctgggatgaacatgggatgacctgcctgcagagagaagcaactcaccccagggcctccttctgctgagagctgcagggaatgatggcacaacctgcttgcagagaggagctacccactccagggcctcccctctgctgaaagctgggcaagcaatgggacaacctgcccgcagagagaagctacccactccagggcctcctcttcactgagagccacagaaaatgacaggatggactgcctgcagagaggagctacccaatccaaggcctcctctgagctactctgtcgctcaataaagctcctgttcaccttgctcaccctccacttgtccacatacctcattcttcttgggcacaggacaagaattcaggaactgctaaacagcagggctgaaagagctataaaacccacagggctgaaacatgcgccttgccatgttgtgggtgaagagaaggagagaagagctgtggcccttcagggacctaggagctccctgagccagggctgtgactccctctttggaccccagtgtttcctatagtctccaagcttctgagtgccactgcattccctggtggcagctgtggaagctgcttatggtgcacctggtctggccgcagcctctcagagagccagggcccctgccagcacctggagctgtctgctctgctgcagcagctggtgtgcctggctgcatgcagtggccggacctcatgcttgcttgcttgctcacacacccctcgcccctccatgcctggcttgcccttggcaagtgtgagatccaggctagtagtgtgagctgagcacagcctgccaggccgtgtgggtggaatgagcccagtgggcccgagcaaaactcaggcaaaggtgccaccagccacagaggtttccaaccagaaatcaacaccccaaggatcctgcaacatttttgagggctcgtccaggatctgcagaagggtgagtgaaagggtgagtaaaagcagatctgctctttctgtccctttttaggagtccctaaactcaacaatagctaaaatgaaagaaaaacaccaggcctctattagccagttaaaattaactagcagagatgctggacttaaaacatggatgatagccttgctggggaggacactgtcaatccctcatcatcctcaagtgttgagaatgttgggtttgtttcaatcccgtttccttccatgaggtctacctgttacatgggaccagaaggaggtcctggggcaactgagggtatctggctgaggctatgcctcagtgttatccaaaggcccctggactaactcctgaaactcaagtccctaagcgcccattagggtgttgttggcactaggacctccagtctcctatctttctttctttcatggttgtcaaggttcttatctcttcttttttttttttttttttgagatggagtcttgctctgtcgcccaggctggagtgcagtggcatggcatgatcttgactcctgaccttaggtgatccacccaccttgacctcccaaagtgttgagattacaggcatgagccactgcacccagctcctatctcttctttatatacaacattaaatttctgtgcgcacgcgtgtgtgtgtgtgtgtgtgtgtgtgtgtgtttgagacagagccttgctctgtcgcccaggctggagtgcagtggtgtgatcttatctcactgcaacatctgcctccaaagtagttgggatttcaggcatgcaccaccatgcctggctaatttttgtattttaatagagatggggtttcaccatgttgggcaggcttgtcttgaacacctgacctcaggtcatccacctgcctcgccctcccaaagggctgggattacaggtatgagccaccgcatccagcctacaatgttaaatgttaagaatgttgctgcaaaacagagaaattactggatagaatgagcatttggcttagtcatcaaaagtataaaatggaaggttaagagtagcacagatgagcaaagtgtgccttggtatctgtacataattttgtgggaaaaatgttattgtcatttccttggttgccatcttggtgcaaggcaccttgaggcacagaacagaagcatggcctcaggaaggaagcttttctgtaaacacaagggcaaataaatggtccaaggtcccatacatgcaggccttctttgccttgcagggtaatctggacctttgccaacattgtaggattgattcagctgtcctaatggccttctcaggagaagctgcaaggggtaatcccagagaaatagggaagcataccccagaggtacctccagcaggggaatcaatcccctcaactcctccctatccaggttctctctcaagcttgccccggcatagtaatccttgtttaaggcaggtcccagtctcaactgcccaaaaacagatgcctggtgaatatggtcccattgaagttcagttttccttttctctatagaacttaaggcaaatttaaggggagatcttggcaagttttcagatggccctcacaggtatatagagagtttccagaacttaacccaagtatttgagctctcctggaaagatgtcatgttactcttgtttttgtttttgtttgagatggggtctcactctgtcatccaggctggagtgcagtggcactctcttggctcactgcaacctccacctcccaggttcaagtgattctcctgccgcagcctcccaagtagctgggactacaggcatgcaccaccacactggctaatttttatatttttagtagacatggggttttaccatattggccaggctggtctcaaactcttgacctcaagtgatctgcccaccttggtatcccaaagtgctggaattacagccatgagctgcacccggcttcatgttacttttgaatcaaaccctgaccaccactgaaaagcaggccaccctgaaagtggcacagaattttggggatgagctttatatcttatatagggccagggaaggggatgagacttatctgattggaagaatagcagtaccactgaagaaccctaaatgggacctcaatgatgagacaaaagaatggggccaggcgtggtggctcacacctgtaatcccagaactttgggaggctgagatgggcggatcatgaagtcaggagatcaagaccatcttgcccaacatggtgaaaccccatctctactaaaatacaaaaaaaatagccaggcatggtggtgcacacctgtagtcccagctacttgggaggctgaggcagggaatcacttgagcctgggaggcagagattgcagtgagctgagatcatgccactgcactccagcctgatgacagagcaagactctgtctcaaaaaaaaaaaaaaaaaagaaaatggaaaaggaggccaggcacggtggctcacacctgtaatcccagcactttggaaggccgaggtgggcagatcacgaggtcgggagttctagaccagcctgaccaacatggtgaaaccccatctctactaaaaatacaaaaatgaattagccagatgtggtggcacatgcctgtaatcccagctactcaggaggctgaggcaggagaataacttgaacttgggaggtggaggttgcagtgagccgagatcatgccactgcactccagcctcggcgacagagcaagacaccatctcaaaaaaaaaaaaaagaatggaagaggaaacactttcaggtgtgcataccagagggcatacgaaggactaggacaaagcctctcaattacactaagctatccatggtagacagggattaagcgtgagtcccactgccttcctggaaaggctaagagaggccttggtaaaacacacctaagtcctgattgaggagagggacatctgatcctagaggatgagtttatgacacagtcaggccctgatgtcaggagggagcttcagaaacaggctgcagggccagatggtactttggagggcctcctgggagtggtcaccttagactttgctgtgggaacttggaggaagtccagaaaagagagaggagatacggaaaaaaaggcaaaagctctaatacctgccctgaagcttcacggactccatagtccctgagatgcacccgttgtctgctgcaaatgtggcaggccaggccacttcaggagagactgtctgggcagtgcggggaggccacctcaaccctgtctggtttgcagtgggaaccattgtaggggcagcctgtccctggagacacaggttgccgggtccaggaccagacttccagatggtccagaaggacagatggattctagggctcctttcccaagctctgatggttcagaccactattaccatccaggagccctgggttgaagggaggaaggtagccacctcctggactctggagcaggcctttcagttctcctccccaacccaggcccccttcctctcttagcacgactgtaagcagcatctcaggtcttcttccccaccacgccaggagtcaacatagtcttgtgactacagggagcttttctctgtggggttacttttgtttccgttagggagtgtattagttcgttttcatgttgctgataaagacatacccaagcctgggaaggaaaataggtttaacggactcacagttccacatcatgaggagattctccagagtctgagggtcaaaggcgttccagtgatttatttatttatttattttttaagacagagacacgctctgtcacccaggctggagtactgtggcacaatctcaactcactgcaacctcacaatcatggcagaaggagaaaggcacttcttacatggcagaagcaagagagaatgaggaagaagtgaaagcagaaaccctttatgaaaccatcagatctcatgagacttattcactaccatgagaacagtatgggggaaaccatccccatgattcaatgacctcccactgagtctctcccacaacatgtgggaattatgagagtataatttaagatgagatttgggtggagacacagagccaaactgtatcagggaggcaccttattaggtcaggtccccaatttctgggactccctttctctcccttgtttgaggaggacctggcctcacggcttcacctgcttatgatagagaggcagtagaggagcagccccctccagttgctatctgcaatttggcgagggccacatgggactaatttaatgggtccatagacccatctgagtcaccttttttgtcccaagcttcactttaaagtcctgaaatgggacattagacctgaggcagatgacagcaggagttgagaggcacagcccaggtgagcatgactaattcctgccagttagccctcctgcttcatggatggaagcatagataaggtctagggaacccaaaggttaccaacagcagaaggatagggtggtatgtaggtaagtgcgaatattcctacccactaggccttcccgctgcatgggtgaaggttgcactcgcagctatgagtggcacctgcaaaggtcactgggactcaaggatataaggttggaagaggaaaaagagatgcctttttaaaaaaatctccatcacgtaccccaggtattcactggaaagagaggaacaaagggatgtctttcccctctttccagatgggtaagcaaccaatcattttcagcctgcactcctctcaagtgcattctaaattactggaacgcagccgggtgtggtggctcatgcatgtaatcccagcactttgggaggccaaggtgggtggatgacttgaggccaagactttgagaccagcctgaccaacatggcaaaaccccatctctaccgaaaatacaaaaaattagctgggcatggtggcacatgtgcctgtaatcccagctacttgggaggctgaggcaggagaatcacctgaacccaggaggcagaggttgcagtgatctgagattgtgccacagtactccagcctgggtgacagagcatgactctgccaaaaaaaaaaaaaaaaagaagaagaaaagaaaaaagacactggaactcctttgaccctcagactctggagaaaaaaacatttttcctttattcctcctctgttctctcttcacagatgggtaatcacacctctgtaccacaggatactcccctgggatccatcccgcaaactaggaagagtttaatttccccaagcgttaaactgcttggcaatttcttgaggagggacaacttctctttggctgttccccttcacaggactccagggtcaatagggctccatggctcaggggaatggaacccagaagcctgacatgctgacaaaagggtaagagtttttagcagttggacttctggcttctctctctctgtgcaagctggttgtaggaatgacaaaaactgtattctctgcccctccatgagttcaaaagtcagaagtattggccatttggcatggctaaggtcaggtagtaacatattttaaaagatttcctttttttttttgagacagagtcttgttctattggccaggctggagtacagtggtgcaatctcagctcactgcaacctccgtctcccaggctccagcaattctcctgcctcagccttccaagtagctgggattacaggcatgtgccaccatgcccggctaatttttgtaatttttagtggagacagggtttcaccatttggccagactggtctcgaattcctaactgcaggtgatccacctgcctcagtctcccaaaatgctgggattataggcatgagccactgcgcctggcca[135 bp omitted]accgtctccactaaaaatacaaaaaaaattatccaggtgtggtggtggacacctgtagtcccagctactcaggaggctgaggcaaaagaatggcatgaacccatgaggcggagct[132 bp omitted]actataggtatatttaaaaggcctttatgtcgtttatcgttgtagattttgtttttctggaaaaaggtgttttcttttcggtcaactgaacaatttttctccatttttgtcttgccactcttaatgcacacatgaggggttccaggatgacttctggtggcctgggactccttgggaaaaacagaggaggcgccactgatccgttttgggaaaaacctctgttttcctcaggaacttcaggaattacgggcagatggatccctctcaaaatctatttttgtcttccagctatgcctacttattaagccttagaaactacatgttttcctagccctggttctcgaagggctccaccccccggccagtaatccaattaagaaattggcacaagaggctgggcacggtggctcacacctgtaatccaagcactttgggaggccaaggtgggagattcacctgaggccaggagttcgagaccagcctggcagcatagcaaaaccccatctctactaaaaatacaaaaactagccaggtgagttggcgggcgcctgtaatcccagctacttgggaggcagaggcaggaaaatcgcttgaactcaggaggtaaaggttgcagcgagccaagatcatgccacttggacaacagagtgagactctacattccagcttggacaacagagtgagactctgtctaaaaaaaaaaaaaaagaaaaaggaaaaaagaaaaatcttacaactactagtggatctcctgtctgtcatatagttatatatgtgttgtatgtgtgatgtttatataaaagaactctaactgattagcttaaggaaaaataagcacttaggtcaaatattcttgaagaaaaatagaaactgcaatgccttttagttctcatgacttaatcttagagaaataaaaatagtcttaaagattattggtaaaataaaaatgacttcaaaatgtagacatgtggtccaaattatgcagctcagatattaggtttgctaaatgctttaaagtcataaactgcttctttggcttttgaaaactgtttgacttgcctgctttatggtttggtaaggactagggacatagggagctaatcacacccctagatatgctggaaatattcagatcttatctgcacctaggacataattaaaataacttactaggttttcttttttttttttaactaggttttctttttaccaaaaataagaattgctaagagttaccattataacatgtaattgagactcctgaaaatagacttacatgcaaagtatataaggaaagtaaactgtgtctttagttaaagaatataagaaggcatgggaatgtaaatttttgccaaatttagaaatttaaaggattgttttaaattagataagataaagctaagggtttaaacaagttatagaaggtttgtaaaaattaatcttataaaaggaattgtgtgtgtgaatatattgactaaattctttttttttttttttttttttttgagatcactatgtcacccaggctggagtgcagtggcacaatcttggctcactgcaacctccacctcccaggttcaagcgattcttctgcctcagcctccctagtagctgagattacaggtgcatgccaccactcctggctaacttttgtatttttagtagagatgaggttttgccatgttgtccaggctggtctcgaactcctgacctcaagtgatctgcccacctcaactccccaaagtgctgggattacaagcatgagctaccatgctcagtccatattgactaaattcaaaagggtattatttggttttcctgtaagttgaacattggaatggaagcacgatctgctattcttagggcactgatctgcggtttcataataaatgttataagcctttagtatgtttgataggcttcccgaaatcacatttcaacttcaaaattgtcttttctaacccctagcttttggatgctacagaggatccctggagtgtccagggaagaagtagacaggatgatttgacatgtttagctacataggattgccaaaataaggtggtgtttggtctccggtgggttgcatttcagtgaataatgttaatgtgtattccaaaattgtatgggatttctaaagttctgacgtctgagaaagtgttatgaatcataattagggttattatgttaggttattgtagaccacagtggttaccaaatttctttgtcaatcatgattttgactgtgactaccctaggacattttgacattcataggcaattgttgtcttgttttttatgtttgtttgtttttgagatggagtctcgctctgttgcccaggctggagtgcagtggcgtgatcttggctcactgcaagctccgcctcccgggttcacgccattctcctgcctc[222 bp omitted]cctcaagtgcaggtttctgataactttggagattgtgaacaggagttgactgggtgaattgaactaatggaagaccaaagtaatcattcttgattttttgcttggaacattgctgatcccttgttttgtttttcagaatcaaggaagcttttctttccagctattgtagcttttgacatttgtaggagtgaaccaatcagtgatctctgactgcagctcagaagaaactaaagggacagactgtcaaactccaaatggtgatgcaaatggagcctcagacgatgactcccttttactgggagcccttagataggcccccgagggaaaatctgactgccatttttctgaaaacaat[144 bp omitted]ttccccgtctctactaaaaatacaaaaattaaccgggtgtggtgtcacgcgcctgtagtcccagctacttgggtagctgaggtgggagagttgcttgaacccgggaggcagagattgcagtgagccaagattgcaccactgcacttcagcctgggcaacaagagtgaaactccgaaaaaaaaaaaaaaagaatagtcatcatccctaccctaacagcagttagacgtacctcttcagaggggagtttgatggctgtggcagggccaagcaggagtcccgcccctcctgagttgggatgagatctctccaggtgcagctgcagctgcccaaaccacagctgcagagccgggcctcccactccacagagtaaacaggagtcgcacacacccccaatgcagctgcagccacccaaacagaggctgtgtacccaggcatccctgcactcttggggtcccaggaaggtttccctgccctcgcaggcttggaaatgcctgctcccactgcctggcttctccctgctgttggcacccattccagtctcagagcaaagttggggccaagcccaggcactgtcacagcccagctgggtgtgcacatgcttggggcagtggtgacactccagtcccctgctgcctcagccccctctggaccttgggtgctgatgagcataggaaggaagctgagggaggggttgagggcagcttggtgctgacctgcaggtgccccttggcatctatagcctcatcaccacgaacagcagcaggaggcagacaggttcctgggtggaagggggtggatccccggtgaggtcccaccttcaagccagggaggccctgaagcctgggggccaggctgccagtcccacagaccagagtgggaacttgtggtgccttttccaggctgcccatggaccaatcagcatggacttcctcccctctgaggcccatcaaagccctgggctcagccatagctagacagatatagggatgaccagctgcaaagagaagcaacccactccagggcctcctctctgctgagagctgagcacttgacatgacgactagctacagagaggatctacccactccagggcctttttttttttttttctgagctattctgttgctcaataaagctcctcttcaccttgctcaccctccacttgtccgtgtacctcattcttcttgggcgcaggacaagagcttgggacctgccgaatggcaggactggaagagctataacacaaacagggctgaaacacgccccttgcttgccgtgttgatggtaatgagaaggagagaagagctccagcccttcagaaagcctagacctgggagctccctgagccagggcagtgactccctctttgaggcccagcatgaagcttggagtctccaagcttctgggctccaccatggtccctggtggcagccatggacgctacttgtggtgcacctggccaagccgcagccttgcagagagccagtgcccatgccggcacctggagctgctcaccctgctgcagcagccggtgtgtctgactgtgcacaggggctagaccccatgcttgcttgaacacacaccccttgccactccacacctggcacacccttggcaggtgtgggatccaggctggtagcaagagccgagtgtagcctgccaggtcaagtgggcagaatgagcccagtgggcctgagcaaaactcaggcaaagatgccaccagccacagaggtttacagccagaaaagtgacaccatcccaagaattctgcaatggcaccactgcactccaggctgggtaatagagcaagaccttgtatctatgaaccctgaagacattatgctaagtgaaataagccagacacaaaaggacaaatcctgtgtgattccactcctctcctaggagtcaacagaggtccctcaagtcaacagattcatagaaacagaaaataggctggtggatgccaggagcaggggagggtgctggggagtgagtgtttcatggggacagtttcatgctgggaagatgagaaagttctggagatggatgaaagaaagtcaaatgctatacattctcacttataagtggtatctaaataatgtgtacacatgggtgtagagtgtagaatgatagacattgggtgggcggggggggtggatggaaggagagaaagtgatgaaaaattgtataacagatacaaagtatattattcaggtgatggatacacgaaaagccaagaccaccattatgcaatatatgcatgtgacaaactgtacttgtagcccttcaactttttagatttttttttttttttgagacggagtctcgctctgtcacccaggctggagtgcagtggcgcgatctcggctcactgcaagctccacctcccaggttcacgccattgtcttgcctcagcttcccgagtagctggaactacaggcgcccgccactacgcccagctaattttttgtatttttagtagagatggg[146 bp omitted]cgcaatcatagctcactgcagcctcaacctcccgggctcaagcaatcctcccacctcagcctccccagtagctgggaccacaggcatgtgccaccacatccagctaatttttaaaatttttttttgtagagatagggtctccctatgttgcccaggctggtcttgaactccaaagaaagtaacattttggatgttctggtcttgcttttggtccataacggaactgttactgttaatacgttaagtctctaccgccctctagtggttcactttatttgcaccccgggaacaacgttgagtgttccctttttattttgcctagtagacggtccagccctcttttgggtactttttggaattccttttggcctccaacctgtttcctgtaagctcccagtttgctgcctgccacaaaagtacacacacagccacctgttgcaatacacatacataagtatatatttttttgagatggagtctggctctgtcgcccagtctggagtgcagtggtgtgatctcggctcactgcaacctccgcctcctgggttcaagcgattctcctgcctcagcctcccgagtagctgggattacaggtgcccaccaccatgcccggctaaactttgtattcttagtagagatggggtttcaccatgttggccaggctggttttgcactcctaacctcaggtgatccgccaaccttgacctcccaaagtgtggtgaatacagttgtgagccactgtgcctgaccagtgattttcatttccctaacaacaatgatattgagcatcttcatgtgtgcctggagctgctattattattattattattattattattattattattattattttgacagagttttgctcttgtcacccaggctggaatgcagtggcgtgatctcagctcactgcaacctctgcctcctgggttcaagtgattctcctgcctcagcctcctgaatagctgggattacaagtgtgtgccaccacacccggctaattttttgtatttttagtggagacagggtttcaccatgttggccagactggtctcgaactcttgacctcaggtggtctgcccgctttgtcctcccaaagtgctgggattataggcataagcccactgcacccagcatttttttttttgagacagtttcactctgtcgtccagtttggagggcagtggtacaatctcagcttactgcaacctccgccaattgggttcaagcgattcttctgccctagtctcccgagtagctggaatcacaagtgtgtgacaccatgcccagctaattttttgtattttagtagagatggggtttcactatgttgcccaggctggtctcgaactccttatctcaggcaatctactcaccttggcctttcaaagtgctaggattacaagcgtgagccactgctccagcccttttttctttttcttttttttttttttttttcagacagggtctcactctgtcactcaggctggagtgcagtggtgtgatcatggctcactgcagcctcaacctccctggctcatgaagcgatcctcctgcctcagcctcccaagtagctaagaccacaggtgtacaccaccatgcttggctaattcttaatttgtttgtagagacaggttctcgctatgttgcccaggctggtctcaaaaaatcctctcacctcggtctcccaaaacactgggattacaggcatgagccaccaagcccagcctgtgcttggagcttttgagttcacttttaaacttggaaagaaggcagcctagccctcctggtggccgctcccacccatgaagccagccagagggacgaagagagcctggccctggtgacatcatttgaagcctggacccagccaggtctgcagcctggggctgaacttcaaaagtagatatgctggccaggcacagtggctcacgcctataatcccagcactttgggaggctgaggtgggcagatcacctgagctcaggagttccagatcagcctgggcaacatggttaaaccccacctctactaaaaatacaaaaattagctggcatgcttgcatgcacctgcagtcccagctacttaggaggctgaggcagaagaattgtttgaacccagaaggtagaggttgcagtgagccgagattgtgccactgcactccagcctgggtgacagagcaagactctgtctcaaataaacaaacaaaagtacatattgctgattgtccgtttgtgatttcagtcagttggggttgaatattttgtcctttttcaccaacagaccttcctgattaagcggatcacctgaggtcaggagttcaaaaccagcctggccaacatggtaaaaccctgtctctattaaaaatacaaaaattacccgggtatggtggtgggtgcctgtcatcccagctgcttcgggggctgaggcatgagaattgcttgaacccaggaggtggaggttgcagtgagccaagatcgcaccactgcactccagtctaggcaacagagatcctgtctcaaaaaaaaaaaaaagtatatatgctgattgtccatttgtgatttcaggcagttggggttgaatattttgtcctttgtcaccaagagaccttccctgatggagactagg[144 bp omitted]acctgtctctactaaaaatacaaaaaattagtcgggcgtggtggcgggcgcctgtagtcccagctacataggaggctgaggcaggagaatagcgtgaacccgggaggtggagcttgcagtgaaccgagatcacgccactgcactccagcctgggctacaaagtgagattgcgtctcaaaaaaaaaaaaaaaaaaagagttacagactggattgggaggccgaggtgggcagatcatgaggtcaggagttcgagaccaccctggccaatatggtgaaaccccgtctctactgaaaatacaaaaattagccaggcgtggtggcacgtgcctgtaatcccagctactcaggaggctgaggcacaagactcgcttgaaccgggaggcagaggttacccaggcctcttgctcatcggctacgttcatgccccaagaggaggctgtgaggaggggccagcaggagccagaggacagatactggggatagagcgggatttttttttaaatgattttgcactcgggccacataagctggcaaagaagaggaagagccacggggtcaggggaggaggcaggcgcttctctatcctcctccctcagaagattttgtttgttgattctttttttttttttttttgagacagagtcttgctctgttgcccaggctggagtgcagtggcgcaatcttggctcactgcaacctctgtctcccgggttcaagcagttttcctgcctcagcctcccgagtagctgggactacaggcacgtgccaccaagcctggctaatttttttttttttttgagacgcagtctcgctgtatcgcccaggctggagtgcagtggggtgatctcggctcactgcaagctctgcctcccaggttcacgccattcccctgcctcagcctcctgagtagctggaactacaggcgccggccaccatgcctgcctcattttttatatttttagtagagatggggtttcaccacgttagccaggatggtctccatctgctgacctcgagatctgcccacctcagcctcccaaggtgctgggattacaggcgtgagccactgtgctcagccaccctccccaagaagatttttaactgaggttctcaactctttgggtggtcaaacacctcttcaggggctgtcacggaatcacagctcctctcccccaaatacaccaagacacacaacattttgcagatgattttacaagtttacagacatcctcaaccccacctcttcctaccaccatgatccatcctggagccacaagtgaaaaacctctggcttctagaacaagaaaggaagaaggactcggaagcagatgaccaggaatccaagttcagtcccactactgtctcactgtagtgcaaagagctttggaaaaggacggactgggttcaagtccacgatgtgtggccttaggcaagtcacttgccctctctgagccacatctataaaatgagagtattctcatttatctaaagtgatgcactccaggcacctagattgtatgcccaaacacccatcttttgcacacaatgtcaagtggtctgtggacgctgaaacccatccagggaccccagataagaacctcttactatgtgtctaggctggaatgcagtggcacaacctccactttctggactcaagccatcctccacctcagcctcccaagtagctgggactacaggctcatgccaccacacccagctaattttttttaaatttttcatagagaggaggttttgctgtgttgctcatgctggtcttgaactcctgggctcaagcaatcctcccacctcagcctcccaaaatgttgggattacaggcatgagacactgagcctggccaaaagtctttgctgttgctccagcttgaaagctcattcccatcccaggggtttcacacagccattccctctgtccagaatggacttgccctggcttttggtatcgttggttccctcttgtcattaagggctcaactgcaaagtgcactccctggaccacccatgtgatagtgctgctcccagaaccatcatcttccagaatattattgtattttatcttttttagcgcctatcaatggctggaagtgctttgtgtgtgtgtgtttttatttgtttaatatctatatccttcattagggcaaggacgttgtatgtctttgttgtcttggatccccagaggctagcatctgatatatagcaggagcccaatatatgtatgtgtgttgaatgggtgaatgaatgagtagttgaaaagtagatgaatgaaaggatggttgaatgatttggatggataaatgaatggacaaacgaatggctaaatgtgggcgaatggatggatggatggatggatgtagggtaaggtgatggataaataattgggtaaattaatggataaatggcttaataggtggatgaatgaaaggataataaatgatggatgatgatgaataattgataatggatggatggatgaatggatagtttgatggatgattcaatggatggatagatacattaatgaatgaataggtggattaaaggatagataatagaagaaaggcggaatcgttggataaattactggatgggcaaattaaaggatgaatagatgatagttcaatggagagttcaatagatgaatggatggatggatggataaattagtggtggctggatgaatggataaagtattggatgggtgaattaacgggtggatggaaggatggagaaattaatgtgtggatgaattaaaagataggtagatggataaactaatgggtagataaattaaaggatgggtaggtggatggttagatggataaattaatggatggatgaatcaaaggatgggtggatgatgaatggatagaggaataaattaatgggtagatgaattaaagggtgggtggatgaatgaataaattaatggtagatgaatgaatgaatggatgaataaattatggggcagatgaattaaaggatgagtgggtggctggatgtttgtcaaactctatgctaaggacttcacacacattcatttgttttaaccacacaaaaacccccacaagacaaggaatattatttctgttttacagacaatgtccttgagcttctgaggcaggaaaaatcacttccccaagattgtacaactagaaaatggtggagcaggaattctaacttaggtctgcctgactccaggccccgtgctcttaaccaccatgaaaacagaccttccccaccactccaccactgctttagagactatcctggctaccctcgctcctctctcatgtccacatgcccccaaagcacccagactgcccagtctgggactctgctgttctcagctgtgaacctgaggacctcacaagtccgtgggaggagatgagtgggtctgcatgtaacatctccacatgcacatgtggatgtagaatgaggtgcctggaagtcatgttcattctctggggtgtcccccaagagccagggacattgccatggccagagacagatgagggagtctggtagtgaccaccaatatttagaagctaatatttatttatttatttattattttttgagatggagtctctctcttgttgcccaggctggagtgcaatggcatgatctcagctcactgcaacctctgcctcctgggttcaagcgattctcctgcctcagcctcccaagtagctgagattacaggcatgcaccaccacgcccggctaatttttgtatttttagtagaggcggggttttgccatgttggccaggctagtcttgaacttctgacctcaggtgatccacccacctcggcctcccaaagtgctgggattataggcgtgagccaccgttcccagcctagaagctaatatttagatgccacatccttcagtcaccccagtacctggtgacacagtcccaccagctcatgtgacaatggtcactgggaggctgtggacacagaggaggaaatgaaagaggatggggggggtcatggaggggagatgcacgagacagccccccacagtcaccaggctgctgctcagagatgtcacaaagtccatcatctgcctcaaggcagggcagcgcaggacaaggaggacacggaaggggaaacagaggaaggaaccacgagtgtcccgcaggtgcaagtcctgaccggggctatcttctcaagacacaggcaagttgttgggtggttggatagtcaagaggctggcaggtctcagcagtccttgtcatcaccccggatttccacgtagggcagccccacgggccaactgtcccgaggccagtagcggactttgagggtttcacctggcatctcatagttggcatccaccaaggccatggtgaccatgccataagggaaggtgatgctgatgagcacatgcctgtggagtgcagggcgaaggtggcgagggcacaagatacccacagcctcacgccggccctctttttacttctcatggctcttgaccatccatccaggggagccttctgggtctggccccgtgactgcagccttcccctaccgccaggtcccagtgtctggctctcctctctctgcttctccaaccccagcccccaggtgcctactccgagctttggcatctaagattctctgactctgggccccccacagcctcagagcatgtgcttaccagatgctgtgcagatagaagaaatgaatcctctgccagaagctgcaaagcagacggtcactgatccagctggtcagagcaacagcccataaaaccacggagacctcaatcaggtgccgaagctccttattgctggtcctagagaggggagagggggaccaggggctggctcggagagcagcacctgatggggctgatgggaaattcctccttccacagtgatgaggctcagaggttgggagaagggaaagagcaggaattgagggtgcaagcagagggggcccaatctcgtgcttagaactaacacagcatttccagcacaacaggtgcagttccaaatgtccttcaagccaggcatagtagctcatgcctgtaatcccagcactttgggaggctgaggttgggaggatcgcttgagccctggagtttaagaccagcctgggcaaaatagcaagaccccatctctaaaaaaaaaaaaaaaagttaaaattagccaggcatgatggtgcatgcctgcagttccggttactcgggaggctgaggcaagaggatcatttgagcccaggagtgcaaggctgcagtgagccgtgattgcgccgctgcactccggcctgggtgacagagtaagaccctgtcttaaaaaacaataataggccgggcgtgatggctcacacctgtaatcccagaagtctgggaggctgaggcaggtgaatcacttcaggccagaagtttgagaccagcttggccaacatggtgaaactctgactctactaaaaatacaaaaaaaaaattagccggccatggtggtggccgcctgtaatcccagctacttgggaggctgagccacttgaacccaagaggcggaggttgcaatgagccgggattgcgccactgcacgccagcctgggtgacagagtgagactccatcttaaataaataaataaataaataaaaacaagtaacaataata[136 bp omitted]actctgtctctactaaaaatacaaaaattagccgggcgtggtggcgtgtgtctgtaatttcagctactcaggaggctaaggcacaagagtcgcttgaacccaggaggtggagattgcagtgagccgggatcgcaccattgcactccagcctgggcgacaagagtgagactccgtctcaaaaaaaaaaaaaaaaaaaagatattaactcagtcctcacaaggactttgtagaggagtaaattgaggcacagggattgcactatgccccaccccaccccatggttacacagctggtaagtggcagagctgggatctaaaccaagtttttctgactgcatagtatttattcttaaccaacaagccctttggtgcttgtatgttttggggtagaggtatgtgtgcctcaagctctcaaagtgctgggattacaggcatgagccatcatgcccagcaagaataatatattttttgtaatcaggggagttaaattataaaaaaaaattaggggtgaaattgtatgaaatctgggagaaatatgtaacagattgacaaaatgtgggtggttgttgtggctggttagtgggcgtggggaggtttgtggggctattttctctgcttgcatgtctgtttctgggtttcatcataaaaaggacaaactctgctgggcacagtggctcacgcctgtaatctcaacactttgggaggccgaggtgggcagatcacctgaggtcaggagtttgagaccagcctggccaacatgacgaaactccgtctctactaaaaatacaaaaattagccgagcatggtggcatacacctgtactcccagctgctcgggaggctgaggcaggagaatccttgaacccgggaggcagagtttgcagtgagctgagattacaccactgcactccagcctggaagacagagagagactctgtctcaaaaataaataaataaataaataaaataaagataatgtagggtggatgcagtggctcacacctgtaatcccagcactttgggaggctgaggtgggtggatcgcttgagcccaggagttcaagaccagattgggcaacatgacgaaaccctgtttctacaaagaaaaatacaaaaattatcctggcatgatggcatacgcctctagtcccagctacttgggaggctggagtgggaggattgcttgagcctgggaggtggaggttgcagtgagccaagatcacgcccctgcactccagcctgggcaacagagcgaggatccgtctcaagaaaaaaaataataataaggacaaactctgcagtcagtcaggttcaaatcctggccctgctacttgttagtgggtgatcttggagaagggacgtcccctccgcgagcctggagtcaggggtgctaggagggggatgggagcctcctgcccaggcacctgcagccttcactcacttcctgtactcctggcacacgatgtagagaatgtgcagggcaatgctgttgagggcgtaggcgttgaccgtgggccgcaggaaggacagaagggtgctgaccacagtggtgatgaagaccaggcggatgaactgggacctggggaggaaggggctcagctgtaggcgggaagggaggtcctgggattgtaggcatggtcacttggagatcccgtggcccaggtgggtgagaaaaggacaggattctggggagcccagataggctcagaaaagggtcctagccaggcagggcacggtggctcatgtctgtaatcccagcaccttgggaggctgaggtgggcggatcacctgaggtcaggagtttga[133 bp omitted]ctcctgcctcagcctcccaagtagctgggactacaggcgcccgccaccacgcccggctcattttttatatttttactagagacggggtttcaccatgttagccaggatggtctcaatctcctgacctcgtgatccgcccgcctcggcctcccaaagtgctaggattaccggcatgagtcactgcgcctggccctggtgaaatcccatttctgctaaaaatacaaaatttagccaggtgtggtagcagatgcctgtaatcccagctactcaggaggctgaggcacgagaattgcttgaaccaggaggcagaggtttcagtgggccaagatcacgccacggcactccagcctgggtgacagagggagattctgtctcaaaaacgacaacaagaaaaagggtcctagcccggcacggtggctcgtgactgtaatcccagcaatttgggaggctgaggtgggaggattgcttgagctcaggagttcgagaccagcctgggcaacatggcaaaaccctgtctctaccaaaaatacaaaaaactagctggatgtggtggcatgtgcctgtaatctcagctactaaagaggctgaggcagggatcgcttgagcctgggaattggaggttgcagcaagctaagattgcgccactgcactccagcctgggggacacagcgagacttcatctaaaaaaaaaaaaaaaaagaagaaggagaaggagaagaagaaggtcctgaggctcccaagtggactcagcagaaagtctcagggagcccaggtgagcccaggcagcgtctaaagggggatcccagggaggactcagtaggatgagaagagggtcccagggagcctgggagagcgtgatggtttccagggcccaggtgaggtcaggcaaggagttcaggggatcccagctgggctgagaagagggatccctgggtccgggtgaatttaagagatgtcagacagtggctctccaggacccagtagggataaaggaaagatgacaggggtcccagaggtcaatagggtgggctgggggggtcctggagggctcaggtgggttaagccgggttagaagagaatttcacttgcctgtaatcccagcactttgggaggccaaggcaggtggatcacttgagatcaggagatcgagaccagcctggccaacatggtgaaaccgtctctactaaaaatacaaaaattagccgggtgtggtggcaggtgcctgtaatcccagctactcgggaggctgaggcaggaggatcacttgaaccctgaaggcagaggctgcagtgagccgagatcgcaccactgcactccagtgtgggtgacagagcgagactctgtctcaaaaaggaagaagaaggaggaggaggaggaggaagaaaaagaagaaggaggaggcggagaagaagaaggagaaggagaaggaggaggaggagaagaagaagaagaaggagaaggaggaggagaaggaggaggagaaggaggaggaggtggaaaagtagaaggagaaggagattatttcacaggggtcaagggtgggagtggggatcaattagatcaagagagggacccagggggtctaagcagatcagatgaaagatgccaggaacgccaggtgagaggctcggggaggagtccctcaggcccaggtaagtgtagacatgaggtcctggaactcctgttggctgcaacagattctggaggaagtcccaggttatcaaagtaggatcaagggagggattccaagaaaccaggtaagctcaggggaggggtctccagaagcccaagtgagtcaggcagggtcaggagaaaacccgaagtggtcaggggaggaattccaagggccccaaagagggtcaagggtggggacccaggggactcaggtgagctcatgtagagtcaactgaagactcagaccccaccctgtccagatggccagcccctgacccacctgttccccccaaggaaggaggggaaatagcagcggggcatccatatgctatagccactgcccaggagccacaggatggcgatctcgtccagcagctggcccaggaagctgagcgtcatgtggaaatacatggagaacaggcctgcagcggcaagggcaggcggtcagtggggtccgccacctcctaaacccccactgcctcccgactgtcacagacctgaaccacacctccctacctatgatcatgaagaggacccagacaacgtaaatgtagcgggagcgcttctgggcatacgggtgcatcaggagcatcatcagtggcccgaagatgaagaaggggatattggagaactggagcagagagagccatagggaggagctcgtcagataggggagacggaggaggctgccctctgtccagacactcagtcaccagccagtcggttacctgctgcatttcaggcaatgcatcaacccaggatttgtcaatcactcacctgtcaacctttcagccgaccctttttttttttttttttttagatggagtcttggagtcttgctctgtcactcaggctggagcgcagtggtgccatctcagctcactgcaacctccacctcccaggttcgagcgattctcctgtctcagactcccgagtagctgggattaaaggcacgtgccaccacgcccagctaattttttatatttttggtagagacagggtttcaccatgttggccaggctgctcttgaactcctgacctcaggtgatccgcccatcttggcctccccaaagtggtgggattacaggtgtgagccaccgcacctagccacttttcagctgatcttgaccatcagctggtcatccatagatcaatttctcgatccgttattggttcattcattcattcagtgagtgtggcaaagactatccactaaacttccatatatattctccttctcttttactttttctatttatttattttacagtcaggatcttgctgtctgctgccaggctggagtgcagtggtgggatcatggctcattgcagcctcaatcagctgagctcagaggatcctcctgcctcagcctcccgagtagctgggactacaggtgcccgccaccccacctggctaattttcttttattttttgtagagaaggggtctcactatgtcacccaggctggttgcaagctcccagcctcaagtgatcctcccaccatagcctaaagtgttgaaattacaggtatgaaccactgcacccagccccttttcctgtaaaaatagtatctcccaagtttgaactgggcacacagcttacccagtgaaagactacatttcccagccttcgctgcagttcactgtggccttgtggccttttgacctgctctggccaatgagataagaatgtaaatgacatctactacttccaggtcagtcctttcaaaaaccacgtaaggaaagcttgccccctttcctcttcctgtgggctgaaatgtggccatggatgtcatgagttgaccttgcccttgcagacaaggaaagacgatgcagtacctttttgacaaacagcatgaagcagaaatgatactgtgtgacttctgaggttaggtcataaaaggaactgtggcttccacctttctctatctcataggacaagacgtccagatcctaggccaccacacaagaagactggctacccttgaagccaccacgctggagaaaccatgtgtagagaccacactgagatggagagagatgccagaggagggccagtggttcaattcttccctat[137 bp omitted]catagtgaaactctacaaaacagtatgtaaatatatattgtgaatatatatatatatataatatgtgaatatatatttcacaataatgtaaaacaatacaaaaattggccaggtgcagtggatcacacctgtaatcctagcactttgggaggctgaggcaggcagatcacttgaggtcaggagtttgaaaccagccagggcaacatggtgaaatcccatctctactaaaatacaaaaaaatagctgggtgtagtggtgggtgcctgtaatcccagctacttgggaggctgaggtgggagaattgcttaaactcaggaggcagaggtggtagtgagccgagatcacgccatcgcactccagcctgggcaacagactaagacttcacctcaaaaaaaaaaaaaaaaggtcacaagaacatttgcacccaaaattaaatgactcaagaccccgacgtgctgacatcagactttgactccccacaaagtgtctccctgatatgtctgagccgcgacaagtctctcatatgacaaatacttatataatatgggtggaaatgtaaatgggtacaacctctacggaaaacagtatgcagaattttcaaagaactaaaattaggactaccatttgatccagcaatcccgctactgagtatctacccaaaggaaacgaaatcattatactaaaatatacctgcgttcatatgtttattgcagcactgttcacacaggtgaagatatgaaatcaacccaatgattggataaagaagatgtggtatatatacacaatggaat[137 bp omitted]gcctcctgagtagctgggactgcaggtgcctgccaccacgcccagctaattatttttttgtagtttt[135 bp omitted]tttatttattgagacagggtctctctctgttgccgaggctggaatgcagtgacacgatcatgggtcactgcagcttcgacatcccaggttcaagtaatcctcccacctcagccctccaagtagctgggactacaagcatgcaccaccatgtccagctaatttttgttttgttttgttttgttttttgagacagagtctcactccgtcgcccaggctggagtacagtggcgcgatctcggctcactgcaagctccgcctcccgggttcatgccattctcctgactcagcctccccagcagctgggactacaggtgcacgccgccacacctggctaattttttgtatttttagtagaggcggagtttcaccgtgttagtcaggatggtctcgatctcctgatcctgtgatccaccctcctcggcttcccaaagtgctgggattacaggcttgagccaccacggccagcctaatttttgtattttttgtacagatgggatttggccatgtggcccaggctggtctctaactccaggactcaagcaatccacccgccttggcctcccaaactgctgggattacaggcatgagccaccacacctggcctggaatactatttagccattaaaaaaagaatgagcccaggtgtggtgactcacacctgtaatctcagcacttggggaggttgagacaggcaaatcacgaagtcaggaattcgagaccagcctggccaacatggtgaaaccccatctctacaaaaaatacaagaattagccaggcatggtggtgtgtgcctgtgagtccagctactcgggaggctgaggcaggagaatcacttgaatctgggagacagaggttgcagtgagctgagattgttgcactgcactccagcctgggtgagagaacgagactccgtctcaaaaaaagaaaaaagaatgaaataggccaggtgtgatggttcatgcctgtgattccagcaatttgggaggctgaggcaggagaattgcctgaggacaagagttcgcaaccagcctgggcaacatagtgagaccccacctccataaaaaataaatttagaaaattagccaaacatactggcatgtgcctgtagtcttaactacttgagaggctgaggaggaaagattgcttgagcacaggagttggaggctgcaggagctgtgattgtgccacttcactccaacctgggtgacagagtgaaaccctgtctcacacacacacacaaagaatgaaatgcctttgcggcaacatggatggaaccggaggacatgatcttaagtgaaacaactcagaaacagaaaatcaaatatcgggccgggcgcggtggcttgcacctgtaatcccagcactttgggaggtggaggtgagtggatcatgagaccaagagttcgagaccagcctggccaacatggtgaaaccttgcctctactaaagatacaaaaaattagccgagcatggtggtgcatgcctataatcccagctactccagaggctgagacaggacaatcgcttgaatccaggaggcagaggttgcaatgagccgagatcgcaccactgcacaccagtctgggcgacagagcgagactccctctcaaaaaaaaaaaaaaaagaggtcagacttcaccaccacacaatacatacatgtaacaaaactgcacttgtacttcttcaatttatacaaacaaaagaaaaacatgaaactgtcacatgagctcagaaacaagtctctttccctccccatctttttttttttttttttttttctgagatggagtctcactctgtcacccaggctggagtgcagtggtgcaatctcggttcactgcaacctccgcatcctgggttcaagcgattctcctgcctca[221 bp omitted]aggtgtggaaagaaaaacaagtgattgatatgaaatggacaatgtcagtaaacagattacgactacagttctggactgcaagcgcttctcttcagtggtccaaggacagatgggacaggggccatgccaacgcctccatgcgcctcttctcagcccgtggccctagttcagttgcctccatttgtgctgatgcacacatactcccaaacaaacacaatgttccctctgcctccaaccaaacaccagcccttgaatatcaacgcgtgcctgaagatactgacccaaccagtctcccagattcaaaagcatccattaaaacgtgtctgggccttcaataaataaagtctaaactcttaaacttggcgtataaattccttccataactcatctctctccaactttttttgttgttgttttgttttttgtttgttagttttgtttttgtgttttttttctttttgagacagagtcttgctctatcacccaggctggaatccagtggggcaatcttggctcactgcaacctccaccgcccgggttcaagcaattctcctgcctcagcctcccgagtagcagggattacaggcactcaccaccatgtatgtctaatttttgtatttttagtagaggcagggtttcatcatattgcccaggctggtctcgaactcctgaacaaagcagatccactcacctcagcctctaaaaatctccatttaaaacatgttcaggctgggcgcggtg[236 bp omitted]agaaaccccatctctactaaaaatacaaaattagccaggtgcggtggcgcatgcctgtaatcccagctactcaggaggctgaggtaggagaatcgcttgaacctgggaggcagaggttgcagtgagctgagatcacacgattgcattccagcctgggtgacatagtgagactctgtccccccaaaataaataaaaaataaaaaataggccaggcacagtggctcatgcctgtaattccagcactttggaaagctcaggcaggcggatcatgaggtcacgagatcgagaccatcctggctaacacagtgaaacaccgtctctactaaaaatacaaaaaaaaaaaaaaaatagctgggtgtggtggcaggcgcctgtagtcccagctacttgggaggctgaggcagaagaatggcgtgaacccgggaggcggaggttgcagtgagctgagatcgtgccactgcactccagcctgcgcaacagagcaagactccgtttcaaaaaaaataaataaataaataaaaataaaattattcctaactcatctctctccaactcaaaaagaaaaagaaaaaaaaaagaaaacaaagatggaaagactagacgggtggtggtgattaagagggtgctcccctgctgcctggccctgtgactaatgcctcttggtttctcttcgcttgtatcagtaaaagcaggacacatcatcaatggtaccttgcaggctgatgcgggccatgcacaagatgaggcattgcagaagtgcattgcccaggatgtggtatgagctcaaaaaatagctggggctgctgctgttgttattgttgaaggagataataataataacaggcctgttatgggtatcgttattccaagcttaggggccagcagagtccagccaggagttatcaacagtgtccctaagcgctcagaaggaggacagagactgtgggtggagatactgactaatgggggaccccgactaatggagtttccgataacatcggaaactgcctggatgccagggtctccctccctgccttccggggctcagcccccacgttccctgcttctcatcccacccaggctctgccaggcgggggagacacctgtctgggatcccatccaaagccagcccagtcctgaactctggacacaagtgagctggaccttcttggtcccagctccagcaggtgacatcacctccctcccttccttcattcattcgttcattcattcattcattcatttgtccaagcatcccttgagtacctactatgtgctcaaggaccataccagtgtctgaaaacaaagtccctgccttctcggggtgtatacagtcaggacagcaggggacctcctgtgcctggttttcctgctcctacttccagaggctgctgtgaggattacagagttaagtgccacgggaccagggagctctgtgtgttttgccccctccccaccctgtatctagaacactctctggcacacagtaggcgcctaatacattttagtagaaaagaatacacataaataatacagaaggggccaggcgcagtggctcatgtctgtaatcccagcactttggaaggctgaggtgggcagatcacttgaggtcaggagttcaagaccagcctggccgacatggagaaaccctgtctttactaaaaatacaaaattagccggtgtggtggtggatgcctgtagtgccagctactcaggaggctgaaacaggagaatcgcttgaacgtggaggctgcagtgagctgagatcgcaccattgcactccaacccctgtgacagagagagattctgtctcaaaaaaaaaaaaaaaaaaggaaagaaagaaaagtttgttgaatacatctccaacatctcctcattcttcgtcctcattgccaaagctcaaactccctcccaccagcaacacctggcctctgtctccagttgaggacagccacctgcattcattccaagtgtgcctgctaatgttggagggacgaagtgtgcaccggccacagcacaagacttaattgcatgaattaaaatgcgtatatctcactctgtcacccaggctggagtgtagcggcgcgatctcggctcactgcaacctctgcctcccaggttcaagcaattctcctgcctcagcctcctgagtagctgggactacaggtgtgtgccaccacacctggctaatttttgtatttttagtagagacggggtttcgctatattggccatgctggtctgaaactcctgacctcaggttatccgcctgcctcagcctcccaaagtgctgggattacaggtgtgagccgctgtgccatccaaaatgcacacaattaattcctaatcaccagtaattaagtggtctcacagcaccatggttaagggagagattctaggaccaggctctttaagaagctgcaacttttgtgcaattgtaatttgcatactgtgtggccctaggaaagaaatataccctctctgagccttgatttccccatctgtaaaatggggagcataattgtacctacttcataggattttatgaggattacagttggtgctaattattcaatgaaatgaataaatacctaataaaattaatgaatgtcactttgacatctctgggtgctgtattcactcgtaataagaatagctacaatgtattcagtgcttaggatgtgccaagagctgtgggttgtttttttttttttaacatccctatttttaaaatcaagacataaatcacatactataaaattcactcttttaaactatgcaattcagtgggtttcagtatattcataaggcatgcaaccatcacactagctaattccagaaaattttctttctttttttttttttgagaccaagtctcactctgtcgcccaggctggagtgcagtggcatgatcttggctcactgcaacctccgcctcttgggttcaagcgattctcctgcctcagccacctgagtagctgggattacaggagcccatcaccatgcttgtctatttatttatttgtatttttagtagagatggggctttgccatcttggcaagactagtcttgaactcctggcctcaactgatccacctgtctcagcctcccaaagtgctgggattacaggtgtgagccaccccatctggccgaaatacattctttaaaaaaagagagtgaatgcatgagtttttcttccttggcacatcccaccgcctggcatcttgtagccttgactttggcttattttcttcttctccatccccagaacatcagccccaccagggcaaggagtttcttgtatttttttctttgtttgttttgttttgttttgtttgagacagagtctcactctgttgcccaggctggggttcagtgcgcaatctcagctcactgcaacctccgccttctgggttcaagcgattcttctgcctcagcctcccaagtagctgggactacagacacgtgccaccacatctggttaatttttaaaattatttttagtagagacggggtttcaccatgttggccaggctggtctcgaactcctgacctcaggtcatctgcccaccacggcctcccaaagtactgggatgacaggtatgagccactgcacccggccggcagggagttttggtgcttggatcactgctgtgtcctcagagcctggagcagagcctggtgctcctgcaattcttgttgaataaagaagaaattgttgtcccaacaactcaaacccctccatcagccccaggatgcttgcagggaagggtcaccaacacctgttttcttcaaaggagaaaggaggtccagaggaacctatcttgcctgggagtatcatgggctagatcactggtttcatgcatgtaattatccaacttacggcatctgccttccctgggtcaacaagatttatatacaaattcatccctaagtcatttgtaattgcaataaaaaatgaataaataaaatagaaactgtaacactgtcacccaggtgcgtggggctgaatacattctagtgaaatattatgcagctatttaaaaggatgcttttgatctaaagatgtaaatgaaagacaaaatatgtagcagaaatatgtagcagctcctatttgacttccaggactcgagcacatcttcttcttctcttctgctgtctttccccaaactcctaccccacttggcaaactcctattcatctttcaaaacccaaccctgggtgcccttttccatgaagcctcccaacacctgggctgactcctcgggtgttttcttctcctgtagccacaaccatgagtgtctgggctctgcaacctcaaccccagactcagctccttgcaaacagagcaacaagaaagcaaaagattcttctttggagaatgatatgatttggctgtgtccccacccaaatgtcatcttaaattgtaactcccacaattcccgtgtgattgaattatcggggtgggtctgtcctgctctgttctcctaatagcgaatgagtctcatgagatctcatggttttaaaaacaggagtttcagccgggcgtggtggctaatgcctgtaatcccagcactttgggagaacaaggtgggtggatcacctgaggtcgggagttcaagaacagcctgaccaacatggagaaaccccatctctactgaaaatacaaaaaattagccaggtgtggtggtgcacacctgtaagcccagctactcaggaggctgagggaggagaatagcttgaaccagggaggcagaggtttcggtgaacggagatcacgccattgcactccagcctgggcaacaagagtgaaactctgtctcaaaacaaacaaacaaaaaacaaaacaggcagggcgcagtggttcacacctgtaatcccagcactttgggaggccaaggcaggcagatcacgaagtcaggagatagagaccatcatggctaacacagtgaaaccccatctctactaaaaatacaaaaaattagctgggcgaggtggcgggtgcctgtagtcccagctacttgggaggctgaggcaggagaatggtgtgaaccctagggggcagagcctgcagtgagcagagatcacgccactgcactccagcctgggtgacagcgagactccgtctcaaaaaaaaaaaagaaaaaaagaaaaaaaaatgggagtttccctgcacaagctctttctctttgcctgctgccatccacgtaagatgtgacttgctcctccttgccttccaccatgattgtgaggcctccccagccacgtggaactgtaagtccattaaacttctttcttttgtaaattgcctagtctctttttcttcttttgcaaactgcccagacataaaggtaagtctttattagcagagtgaaaatgaactaatacagagaagtattttcctgccctcccatcttgcttttggtagggcctggcacaccagaggcgtccagtaattaattgtttttgctgtggatattgataagaaggacagcagaagagggaggcatgagtggatctcacatccatacttgtaatttagagcttatgagacctgccattgtgtgtagctcagagaggggcaggtctcctcctgggtcacacagcattcaggggagagctgggactggaatcccactgcagaagccagcctcaaggagactcaggagaggaggtgaggagagtgttggagatggcagcactgcagactatctcccctccacccccttccgactctgatctcctcatttctctctttttatttttattttttgagaccaagtctcgctgtgtcacccaggctggagtgcagtggtgtgatctcagctcactgcaatctccacctcccagcttcaagcgattctcctgcctcaccctcctaagtagctgggattataggtgtgagccaccacgcctggctatttttgtattttttgtagagatggggtttcaccatgttggccaggctggtctggaactgctgacctcaagtgatctccctgccttggcctcccacagtgctgggattacaggcatgagccaccgcacttggcctctttttaatttttttttagacacagggtctcactctgttgcccaggctggagtgcagtgaagtgatcataactcactgcctccaggacctgggggaccttg[136 bp omitted]accccatctctactaaaaaaaaaaaaatacaaaattaaccgggcgtggtggcacgtgcctgtaattccagctacttgggaggctgaggcaggagaatttcttgaacccgggaggcagagattgcactgttgcactttagtctgggcaacaagagcgaaactccatctcaaaacaaaataaaataaagaaagaaagagaaagagagagaagagagaagaaagaaagagaaagaaggagagaaggaaaggaaggaaggaaggaaggaaagagagagagagaaaggaaggaaggaaggaaggaaggaaggaaggaaggaaggaaggaaggaaggaggaaggaaggaaactctcctaagttgtcatcaacccagaagaaggctgcacctggaggccaccaggccaatgcaagcaggagcaaactgacggagcccacacctggacctcttccccttccctactcgagccgcccctcccacactgctgacttctgttcctgttggatgacccttcctggctctctctgcccatctgccaaatgccaccggttgccccagctgaccccacatcatgactctcctctgttcaaaagccaccccatggctccccagggctctcaggacagagcacacagtcctcagcctgacattcccaatttggcccctgaaaacctttccagtcctttctctcacccttcagtctctcccccatcgactggggagactccccctgggctccgcttcaagctgctcactatttcctgccaggctgtgctgttccacctcaagaccttggccgggtgcagtggctcacgcctgttatcccagcactttgggaggctgaggtgggtggatcacttgaggtcaggagttcaagaccaggctgaccaacaaagtgaaaccctgtctctattaaaaatacaaaaaattagccagccatggtggcaggtgctataatcccagctacttgggaggctgaggcaggagaatcacttgaacctgggaggcagaggttgcagtgagccaagatcgtgccactgcactacagcctgggtgacaaagccagactccgcctcaaaacaagaacaacaacaaagacctttacatatgctattccctttgcctccaaacccttgagctgggcgtggtggctcatgcctgtaatcccagctactctgggggctgagacgggaggactgctggagcccaggagttcaaggctgcagtgagctatgatcacaccgctgtactccaggcagggcaacagagcaagaccctgtcactaaaacaaacaaacaaaattcaaagccttagaggacatctactcattctttttagatttggtttccatggtattgtttgtttttcattgttgtttttgtttttgttttattttgaggcagggtctggttttgtccctcaggctggagtgaagtggtgtgatcatagctcactgcagccttgaactcctgggctcaagcgattcttctgcctcagcctccggagtagctgggaccacaagtgtgcaccaccatgctcagctattttttttttttttttttttttaaagacggagtctcgctctgtagcccaggctggagtgcagtggcaccatctcggctcactgcaagctccgcctcctgggttcacccgccactctcctgcctcagcctcccgagtagctgggaccacaggcgcccaccacaatgcccggctaatttttatatttttagtagagacggggtttcaccgtgttagccaggatggtctcgatctcctgaccttgtgatccgccggcctcggcctcccaaggtgttgggattacaggcgtgagccactgcgcccggcctattttttttttaatcttttgtagtgatggggtcttgctatattgcccaggctggtctgaaactcctgagctcaagtgatcctcctgcctcggcctcctaaagtgctggggttacaggtgtaagccaccacacttgccccccagagcattgttgatgttctttccccattcagcaagcagagaccttatgccccattcctctgacaccccgtttctggcacccccttcctctctccgcctcaagctaaccatggggctgaagaaatctgtttctaattctgggtctcttacaacctggggacaccgagcctcctccctggaatcccaggatcatccagcagcggtgggtttatagcattttgattgaataaatgaatgagtccatcagtgaacacaggatacgtttccaacattctaaccaagcatgcgaaccgttacgtcttcatctctccccacattgtagctacaggaacatactttctcctttctcaatctgaccagctcttctttgacttccagaactgagcacatctttccctgctctcctgctatccttccccacttggcaaactcctattcatctttcaaaacccaactcctacatgtccttttctatgaagtctccaaacacctggggtgagttcttgggtgtttcctgtttctgtaaccctgaccatgagctgctgggctctgcatgctcccaaacagagcagcaagaaagcaggctgggtgcagtggctcatgcctataatgccagcacttttagagattgaggcaggcagatcgcctgaggtcaggagtttgagagcaacctggatgacctggtgaaaccctgtctctgcaaaaaatacaaaaattagctggggatggtggtgcacacctataatcccagcactttgggaggct[134 bp omitted]gaggcaggagaatggtgtgaacccgggaggcggagcttgcagtgagccgagatcaggccactgcactccagcctgggcggcagagcgagactccgtctcaaaataaataaataaataaataataataaaataaaaataaaataaaataaaataaaataaataaacactctttggcctgtgggcaaagttcagcccactgccttgtatcatgtgtcccacaagctaagaatcatgtttacattttcaaatgattgaaaaattaaaagattattttgtgacatgtgaaaattatatgaaat[132 bp omitted]aaaccccatctctactaaaaataacaaaaaatagctgggcatggtggtgctcatctataatcccagctactcgggaggttgagacaggagaattgcttgaacctgggaggcagaggttgtggtgagccaagattgcaccactgcactccagcctgggcgacagagtgagactccatctcaaaaaaaaaaaaaaattattggcatacagccacacccatttatttatctattatctatggctggttttcagctacagtggcatagttgcgtagttgagacagagtctggatggcccagaaagccaaaaatattggccaggcgtggtggctcatggctgtaatcccagtactttgggaggccaaggagggtggatcacctgaggtcaggagttcaagaccagcctgagcaacaaggtgaaaccccatctctactaaaaatacaaaaattagccgggagtggtggcaggtgcctgtagtcccagctacttgggaggctgagacaggaaaattgcttgaaccagggaggtggaggttgcagtgagccaagatcgagattgtaccagtgcactccagcctgggcaacagactgagactccatctcaaaaaaaaaaaaaaaaaaaaaaaaagtcaaaaatatttactagctagccctgtacagaaaaggttggccctgggtgcagtggcttatgtctgtaatcctatcactttgggaagtgaaggcacaaggattacttgagcccagcctggcagcatagcaagaccccatctctatacaaaacaatgtttttttagacagagtctcactctttcgcacaggctggagtgcagtggcaccatctccactcactgcaacctccacctcccaggttcaagcaattctcctgcctcagtcttccaagtagctggaactacggatgcatgccaccatgcctggctaatttttttttttttgtaattttgatagagatggggtttcatcgtgttttccaggctggtcttgaactcctgagcgcaagtgattggcccacctcggccttccaaagtgctgggattacatgtgtgagccactgtgcccagcacccatctgtataaaaatttaaaaattagctgtgtttggtggcatgctcttgtggttccagctactttgaaggctggggcaggaggatcacttaagtccaggaggtcaaggctgcagtgagctatgatggcaccactccatcccaggctgggcaatagagtgagactgtgtctctaaaacaggtaaaataaaaataaaataaaataaacacgaaaagaaaaaatttgccacccactccacccttttgaactgtatgatttattagctatgggtttgggatactcagaagcgttttggaggagaaggtcttggggaagccctttctcacataactctgattctattcctcatcccctgacctgtttggagagaggctttttgatatagaatagaatagaatagaatagaatagaatagaatagaatagaatagaatagatccaggtgtgtttgtaccagggaagggtaagtctcgttttgtgcaacttttgtttctgtatgatacacatctggaaaggcaggtacaggatgatgatgatgtaaaatttctttcataataggtgttctgatcagaggagtttgacaactgcagccttacccggtagctacaggtggctcaatttattttatctggggacaggctacagcagaatccagtggaggacaattttgcctgagataagaacacacagctatactcaggctcaggacacacttgaatcagccctttctaggtgctttttattttttagagacaggatattactctgttgcccaggccggaatacggtggtgcagtaacaggttactgcagcttcaaactcctgaactcaagcaatcctcctgccttagcctaccagctagtttttatttttattttatttttaattttttaatttttaatttttttttttttgagatggagtcttgctctgtcacccaggttggagtgcagtggcgtgatctcagctcactgcaagttccacctaccgggttcacataattctcctgcctcagcctcccgagtagctgggaccacaggcgcccgccaccacgcccagctaatttttttgtatttttagcagagacggg[146 bp omitted]aggctggagtgcaatggcgtgatctcggctcactgcaacctccacctcccagattcaagtgattgtcgtgcctcagcctccccagtagcagggattataggcatgcgccaccatgcccagctaatttttgtatttttagtagagatggggtttc[133 bp omitted]actgggtcttgctatgttgcttaggctggtcttgaacttctggcctcaagtgatcctcctgtctcgaccttccaaagtactaggattaaaggtgagagccaccatacccagcctctcagtgccttctgcaagggctctcatctgggtgcaggatgaaaacagaacactggaccacagtggctgctggggattccagagagaagagctctagagcccttacccatcatctcagcctcgtaggaccaatcattcagctccctcccatgttagaggtgggactactgaggaccgggaaccatatctctggctaaggaagagcaagaatcagtgagaccgtgaggatcctggagtctcataatcccacttcccaggtatgggaagccccggggtgaaaggcaacagggtcagagcaacctgagcctcggactctcctcccagaaaagtctcctggactcaccaagtttaaatcctggctctaataaccagggtgaccctgggcacagccttcaaactccttgaacacctgttttatcacctggaaaatgggatgaagtctgtatcatatagattgcatctaactccccatgtcactgtgcagattaaaggaggtgtttcacgtaaaatgtttagggtcatgcctggtacacagcaagcactttttttttttttttgagatgaggtctcgctctgtcaccaggctggagtgcagtgacacaatcttggctcactgcaacctctgcctcccgggttcaagtgattctcctgccttagcctcctgagtagctgggactacaggcgcccggcaccatgcctggctaattttttgtatttttagcacagacggcattt[262 bp omitted]catggtgaaaccctgtctctactaaaaatacaaaaattagccaggcgtggtggtgggaacctgttatcccaactactcgggaagctgaggcagcagaatggcttgaacgcgggaggcagaggttgcagtgagccgagatcgcgccattacattccagcctaggtgacaaagcgagactccgtttcaaaacaaacaaacaaacaaacaaaagaactaagcactatgcctggatcccatcattcccagggctccaggcaaacacctctgtgttcccagcacccagtatgggcatggcatagctgcactgatctttggctttaagctttggctaaatgccgtgatcatttgtgcattcctatttttttttttttttttgagacgaagtctcgctcttgtccctcaggctggagtgcaatggtgcgatctcggctcattgaaacctccgcctcctgggttcaagccattctcttgcctcagcctcccaagcagctgggattacaggtgcctgccaccaaacctggctaatttttgtatttttagtagagatggggtttcaccatgttggccaggctggtctcgaactcctgacctcaggtgatccactcaccttggcctcgcaaagtgctgtgattacaggcgtgagcctccgcgcccggccttttttttttttttttttttttgagacagggtctccctctgtcacccaggctggagtgcagtggtatgacctcagctcactgcatcctccacttcttgggttcaagaaatcctcccccctcagcctcccaagtagctggaactacaagcacacaccaccacacccagctaatttttaaaaactttttgtagagacagggtcttgctatgttgcccaggctggtctggaactcctgggctcaagcgatcttcctgcctctgcgttccaaattgctggggttacaggcatgagccatggtgctaggtacatccatgattttttagcacttcccatgtggtgttttaacagggaaagagaagaccacctcagaatgtccagaactgaggagtttctcaggaggtgggactttttttcttctttttttgagacagtctcgctttttcacccaggctggagtgcagtggcacaatctcagctcactgcaacctccgcctcctgggttcaagcgattctcatgccgtagcctcctgagtagcttggactacagatgcctgacaccgtacccagctaattttttattttagtagagatgggctttcaccacgttgcccagggcgatctccaactcctgagctcaggcaatccacccaccttggccttccaaagtgctaggattacagacgtgagccaccgcgcccagccaagaggtgaaactttttaaatactgaaaccaggatagtcccaggcacactgggacaagttggtcagtgggtacagctgcaaacaagacagacacaatcacctcttccaggaagcctttcctgattggcccaccccctctagctcaggggcaccctctgcctccccctaccacagctgcctctgtgccctccaagaaggcaccatcgctcccggttgcaaatgcctgcagtcacatcagagttagcttagggaaggcagagaccggttcttttcctggccaccaatgtgtctccaaaacctaccacagagcttggcatcaagtaaagacaagtaaatgaatgaaagctggcactctttggctaacagatgagaaaactagggctgagacaggtgaaccactccagcaagattccccagtaaggctgtatggggaggaaccgggattcgaaccggcatctggcgagactccttcacacacccacgcactcaccgtgttgtagaactcggccaccagctccgagtactggaagttgctctcacaccagtccacctcggagctctgataggcgaagatgctaggcatcttgtctcagtggccaccaccagccggctgcgcccggcagagagaaggcgagcttgggaaggctgggccctgatgaggcggggagaggacagcccggtgccccgcggcaggcagactgggaggaaaaacctgctgggccgctccccagttgcaccagggcagcctggctgtgcagtgacagcagccctgagcataagccgtgggactggcactgtccaggcagggcagggggcagaagtaggcagggaagaggcctcccatccagattacccaggaataggaatcggggtgggggcagtggagggaactgtttttatcttttatgtatgtatgtatttatttattagagtcagggccttgctctgttgctcaggctggggtacagtggcatcatcatagctcaccgcagcctcaaactcccaggctcaagcaatactcctgcctcagcctctgaagtagccaggaccacaggcacatgctgccaccatgcctagctaattgtttttttttttggagacagagtcgctctgttgcccaggctggagtgcagtggcatgatctcagctcactgcaagctctgcctcccgtgttcacgccattctcccgcctcagcctcccgagtagctgggactacaggcgcccaccgc[141 bp omitted]gcccggcctttttttttaaaattgagatgcagtctggctctgtcacccaggctggagtgtagtggcgcaatgtcagctcactgcaacctccacctcctgggttcaagcgattctcctacctcagcctcccaagtagctgggatgactggcacctgccaccatgcccagctaattttttttgtattttagtagagataggatttcaccatgttggtcaagctggtctcgaactcctgacctcaggtgatctgcccaccttggcctcccaaggtgccgggattatacgcatgagccacctcacctggcctgagttcctctactttaagctgtgtgaccttgggcaagtgaatttacctctctgatcctctgtttgctcacctgtcatatggagacgatggtgacagagccaactgtaacaaaggaagacagagataaagcatgtacaaaggcttagcccactgcctatgctagagtaggcacttgatggatggtaatgggttttctttttttttttgagatggagtcttgctctgtcccaaagtgctgggattacagggttttcttactgaagctgaccttgaactttaagtcaactttgtgggaataataataattattattattataataaaagagcctggccttagcaagcggttagcaagtgtgcataacaataataatataattatttattatataatagcaatattatattaaaatataaaattattatattaaaaatactattgttatataatattttaaatattttagtatattattttaatgtgattaatataatttaatataataattaatattatatattatataatttttctttttttaagtgcttgattttcagtattatctcatttaacgttcttttttttttttttttttgagatggagcctcactctgtctcccaggctggagtgcagtggcatgatcttggctcactgcaacctccacctccctagttcaagcaattctcctgcctc[220 bp omitted]ggctcacgcctgtaatcctagtgctttgggagaccaaggcgggaggatcacaaggtcaggagattgagaccatcctggctaacacagtgaaaccccatttctactaaaaatacaaaaaaggtagctgggcgtgatggtgggtgcccatagtcccagctactcaggaggctgaggcaggagaatggcatgaacccaggagacggagcttgcagcgagccaaaattgcaccactgcactccagcctgggtgacagagaaagactctgtctaaaaaaaaaagaaaaaatcctaagcgccaggaactattgttatcccttttctttttcttttttttctttttcttttctttttttttttgaaatagagtttcactcttgtcacccaggctggagtgcaatggcatgatctcagctcactgcaacctctgcctcccaggttccagcgattcccctgcctc[134 bp omitted]cggcttcccaaagtgctgggattacaggcttgagccactgtgcctggcctctttttctcttttgagacagggtcttgctctgttgcccaagctggagtgcagtggcgcaatcatagttcaatgcagccttgcttgatctcctgagctcatgcgatcctatctcctgctagtaatcactagcaaggaaactaaagcccagagaagttaaggaacttaccataggtcacacagttaggaagtgatagagacaggcaaggaacaccacctctatgatgcctcagtttcctcacctgtaaggtggtgaaaatgataatggtactgccctctcaagcctgttgtgaagagttagtgagctgacacgatgtttccataaaaagataaattgtgggctgggcacggtggctcatgcctgtaatcccagcactttaggaagccaaggcaggcggatcacgaggtcaggagatcaagaccatcctggttaacatggtgaaaccccgtctctactaaaaatataaaaacctagccaggcatggtggcgggcgcctgtagtcccagctacttgggaggctgaggcaggaaaatcgcttgaacctgggaggtggaggtagtagtgagccgagatcacgccactgcacttcagcccgggcgacagatcgagaccccgactcaaaaaaaaaaaaaaaaaagaaaaagaaagataaattgtggtgctatgttgccctgcattccaaatcactgaactggccgggcatggtggctcacccctgtaatcccagcactctgggaggctg[134 bp omitted]gaggcaggagaatagcttgaacccagaaaacggaggttgcagtgagccgagattgcaccactgcactccagcctgggcgacagggtgagactccctctcaaaaaaaaaaaaaaaatcactgtggtgtctgaaagtaatcaactttttcaatttccaatatttggagaagagaggctcagtcagtgctaatatgttctatgtctcttaacacttaatgactttgacaaaaaagaaaagaaaagcccttcattaggcaacaatattctgttagaatttagtaacatgatttgtttacattgtatttattttttgataagcttgtattcatggtaagccaaatctactttccattcacggtagggttacaaagtttcctttttttttctttttttttttgagatggcgtttgctctgtcccccaggctggagtgcaatggcatgatctcggctcactgcaacctccacctcccaggttcaaacgattctcttgcctgagccttctgagtagctgggattacaggcgtggaccaccctgcctggccaaagttttctttttctttttcttttcttttctttctttctttcttttttttttttttttttttttttttttttttgagatggagtcttgctctgtcgcccaggctggagtgcagtggctcgatcttggctcactgcaagctccgcctcctgggttcatgccattctcctgcctcagcctcccgagtagctgggactgcaggcacccaccaccaacgcctggctaatttttttgtatttttagtagggacagggtttcaccatgttagccaggatggtctcgatctcccgacctcgtgatccacccacctcggcctcccaaagtgctgggactacaggcgtgagccaccgcgcccagccccagaattttctttttaaaataatattttggcccagtgcagtggcttacacctctaattccaccgctgcactctaacctgggcaaaaagagggaaaccctgtctcaaaaaaaaatagttaattaaataaaataaaaataaaataataaaataaatatgtattttttaagagatggagtcttgctccgtttcctaggctggagggcagtggtaaaatcctagctcacagcaatgtcaatttcctgggctcaagcaatcttctcaccttcgcctcccaagttgctgggagtacaggtatgagctactgtgccctggccaaaataaatgtaagtgttacaattgtggttgtgtttgcacagatctatacatgtgatattattgcatagatttgctcccatttttctgagaaaatgaaaagaaaattgtctaacacatgaatgcatgggaaaagctgttgaaatctgaatatggtctataggtcatatttatatcacctttctggttgtgaaaatgtatagttataaaagaggtaccactgggagaaactggatgaagattacctgggattcttctatattattattgcaggttcctgcaagtttataattattccattttttttaatgtgtttgatagagggtctcactctgctgccaggcttgagtgcagtggtgcaatcacaggccactgcagcctcaacctcctgggctcaagtgatcctcacaccttagcctcccaagtagctgggactacaggccaggcaaattttttctattttttgtagagacaggttctcactatgtctcccagactgctctctaattcccgagctcaagcgatccttccacctcagcctcccaaagtgctagaattacatgtgtgagccaccgcacctggccttaaaatctttttttttttttaagaccgagtctcttcctgtcatccaggctagagtgcaatggtgcaatctcggctcactgcaacctccgcctcctgggttcaaatgattctcctgcttcagcctcccgatagctgggattacaggcgcccaccaccacgtcgggctaatttttacatttttagtagagatggggtttcagcatgttagccaggctggtttggaactcctgacctcaggtgatccgcctgcctcagcctcccaaagtgctgagattacaggcatgagccaccgcacccagcctaaaaatctctttttataaagggattgatttagatttttaattaatacatgaatggataaacacaatgtgtgtggttcatccataccgtggaatattattcagccctgaaaaaggaaggaaattctgatacaggcaacaacgtggatggactttgaggacatcaagctgggtgaaataagccagacataaaaggacaaatcctgtgtgatcccactcctaggaggtccccaaagtcctcagagtcacagagacaggaagtagaacggggggtatgaggggctggggagggggatagggagtgagtgtttcttggggacagagtttcagtttggaaagatgagaaagttctggaggggatggtggtgatggctgcatagacatgcgaatgtgcttaatgccgctgaactatgcatttgatgattaaaatgatcagtttcgtgttatgtatcttttaccacaattttacaaagtaatgatttagggtttttgtttttgttttttgttttttgagatggagtctctctctgttgcccaggctggagtgcagtggtgcgatctcggctcactgcaagctccgcctcccgggttcacgccattctcctg[136 bp omitted]agcctcctaaagtgctgggattacaggcgtgagccaccacgcctggcctgatttaggtttttaaaagaggggtttggggctgggcgtggtggctcacacatgtaatcccagcattttgggagactgaggcaggtggatcacttgaggtcagggttcaagaccagcctggccaacatggtgagacaccgtctctactaaaaataaaaaaaataaaattagccaggcgtggtggtgcgtgcctgtaatcccagctactcgggaggctgaggtacgagaatcacttgagcctgggaggtggaggttgtagtcagccaagatcgcgccactacactccagcctgggcatagagcaagactctgtctccaaaaaaagaaagaaggaaggaaggaaggaaggaaggaaggaaggaaggaaggaaggaaggaaggaaggaaggaaggaaggaaggaaggaaggaagaaaaacagaactaaagcttgacctgactctgtatagcacccctccacaaacatacaccatttagctacagccctagcccccaaatccgcttcccaggtggaccaggagggcaaacagacaccaccactgccaccccagctccccagtagcgaccctgactccttccccatggagtaattttgaaacagtctctgctctgtgtgtgggtggagcagatggtctctgaggcccctttctgctcatagctggaacaggacccagctgctgagatcctgaatcttggcgagggtttaatagcaggcagtaaggtagtgactggcacccacgcccagcccagaccggagaacttgagtgatcatggtgctgactagggaggacagagcagccaggaaggtgggtgggagccgggggagagctcttcccccgctagggggagagaaggggctagagagagggtgacaaacagaggcgtgtgagctctcagcggttattgtaacaaatgccaccaatgtaatggcttagaacagcacacacttatcatcttacctttctacaggtcaggactctgaaatgagtcttataggctaaaggtgtcatcacagctgtgttcctggtggaggctccaggagagacctcgtttcctgccccgtccagtgtctagaggcaacccatgtcctgttctccaccttcacagccacagtgcagcctcttccagtctctctctgactttgttcttttcttttgagacggagtcttgctctgttgcccaggctggagtgcactggcgcgatctcggctcactgtaacctccacctccagggttcaagcaattcttgtggcaggagaatcgcttgaacccaggaggtggaggttgcagtgagccaagatttcgccactgcaaaccagcctgggcaacagagcgagactccatctcaaaaaaaacaacaacaaaaaaccagtctaggcaacataggggaccctgtttctacaaaacattaaaaagttagccagtgggggtacacacgtgtggtcttaacttctcaggaagctgagatgggaagattgcttgagcctaaaggtcgaagttgcagtgagctatgtgtgcaccactgcactccaacctgggccacagagcaagaccttgtctcaaaaaaaaaaaaaagaaaaaaaaagaaaaagaaaaagaaaaaaggaactatacccatcttagcattgggcttttttttgttttcttttgttttgttttgttttgtttttctttttgttttgagatggagtcttgctctgtcacctaggctggagtacaatggtgcagcagcctccactcaccacaacctctgactactgggttcaagcgattctcctaccccagcctcccaaatagctgggattacaggcacccgccaccatgcccggctaattttttttatttttagtagagacgcgggtttcaccaggttggccaggctggtcttgaactcctgacctcataatctgcctgccttggcctcccaaagtgctaggattacaggcgtgagccactgcacccagcagtgttggttttaatacttgctttctatttatttagtagctttccatgtagtggagcaatataaaatttccttttgaagtaaagatatgcattaatatttggaaagtgtttttggaaaatgaacttgtttaaagacagtgtttaagtcaataatggttaccgtacagatggggaaaattttagtctaacaatgcccaaagtcacaaaggacattattgggtaattggtgaaatttgcacatggaatataaagtagataatagtattgtgtccatatttattttctgaagtagataaatgaattctggttgtgtaagagagtatcctagttctttttttttttttttttttttaagatggagtttcactctgttgcccaggctggagtgcagtggcttgatcttggctcactgcaatttctgtttgagttcgagaccagcctgggcaacataggcagactgtgtctctaaaaaaaaataataataatccattttaaaaacaaactatttcagaccgggagtggtggctcacacctgtaatcccagcactttgggaggc[135 bp omitted]gaggcaggagaatggcgtgaacccaggaggtggagcttgcagtgagccaagatcgtgccactgcactccagtctgagcaacagagcaagactcaatctcaaaaaaataaataaataaatacaataaaataaaaacaaactatttcaagataaaaagttgtgggtttgtttgttttgagacggagttttgctcttgttgcccaggctggagtccaatggcatgatctcggctcactgcaacctccacctcccgagatcaagtgattctcctgcctcatcctcccgaatagctgggattacaggcacccgccactgtgcccggctaattttgtatctttagtagagacagggtttctccat[133 bp omitted]tggtgaggatgggaagtgggggagtggtggaaatatgaagaggccaaccactttggaaaataatttgacattacctgaagcattactgggtacagtagttcaactgttagaacaagacaattccacaaatatcagtgtcctaaaagtttacatctcacataagcaaagagtatggagggtgaagctgtcccagaaggctcaggcaagtgggaatttagcaatccaggccccttccttccttctcatgatgcctccatcccagcatgtggcctccatcccaacacgtgacctccatctcaacatgtggcctccactcccaatatgtggcctccactttcaacatgtggcctccatacccatcaagtggcatccatctcaacgtggggcctccactcacaaaatgtgggcttcctcccaacttgtggctctaaatcccaaaatgtgccctttgctcccaacatgtggcctccatacccatcatgtggcccccacctcaacatgtggcctccactaacaaaatgtgggcttcctcccaacttgtggctctcaatcccaacatggctttggtgtacctctattggtcagaactagtcacatgacctccactagatgaaagggttgctgggaaatgtaatctgtagcacagcagccacttcctggtatccactttaccctgtgggaagggagcctgaatctttaaaccacaacaggctgcctccatcacattcagtaaaggtgcaaatgaacatgtcctacaaccagcaactcatctcctggatttatgtccccctgagaaactcccacaaatggacccaggattctggtacaagattattcagagcagccctgcctgcaatagcaaaaccatggaactattcacaaacatccctgagttaaagacttgataagtaggccgggcatggcagctcatgcctgtaatcccaggagctcaagacaggtggatcacctgatgtcaggagttcgagaccagcctagtcaacatagtaaaaccctgtctctactaaaaatacaaaatattagccaggcgacgggaggctgagg[139 bp omitted]gcacctttaattccagctactcaggaggctgaggcatgagaagcgcttgaacccaggaggcagaggttgcagtgagccaagattgtgccattgcactccatcttgggcaacaagagcaaaactccatctcaataaataaataaatttatttatttattaaataaagactcgttaagtaaatagtggattctcctgcctcagcctccctagtagctcggactacaggcacccacaaccatacctggctaatttattgtatttttagtagagacaaggtttcaccatgttggccaggctggtcctgaactcctgacctcaagtgatccgcctgcctcagcctcctaaagtgctgggattacaagcgtgagccaccgcacctggcctgtgtgggtataagttttcaatgcatctaggtaaatacaagggggcacaattgttggattattttgttgtttttttctttaaaccatatatgtatgttatatatcctcttgtgaagatatatttcacaacaatcaatttattttattttattttattttattttatttatttatttgtttatttttttgagatggagtctcgttctgtcatccaggctggagtgcagtggcacgatctcggctcactgcaacctccgcctcccgggttcacaccattctcctgcctc[253 bp omitted]tattggcacacggtcacacccatttgtttgtaagttgtctatggctacttttatgctataatgcagcaatctgcaagctttttgtcacccaggaccagttttgtgcaagacaattttatcacggaggtgtggaatggtttcaggatgattcaagcacattacatttattgttcactatttctattagtattacactgtaatatataatgaactaattatacagctcacataatgtagaatcagggaaagccctccccttgttttcctgaaactagactgtcccagctgggggtgatgggagacagtgacagatcatcaggtattagattctttttttttttttttttcaaatggagtctcactctgtcacccaggctggagtgcagtggtacgatctcagctcactgaaatctcggcctcctgggttcaagcgattctcttgcctcagcctcctgagtcgctgggattacaggcgcgcacgaccatgcccagctaatttttgtattttttgtaaagacagggttttaccatgttgcccagactggtctccaactcctgacctcagatgatccacctgccttggcctcccaaagtgctgggatgacaggcatgagccaccatgcctggcatcatccagctaattttattataataataataataattattattattggaaatggggtctccctatattgcccaggctgctttcaaacacccaggctcaagtgatcctcccacctcagcctcccaagctgctgggattccaggcgtgagccactgtgcctgaccatcacatcatcttccaaggtgggttaattccatgacttactagaagaagggttgccagataaaatacaggacacccagttaaatcagaatttcagattaacgatggataagtttttggcataaatatgttccaaatattgcatatgatcggattatcctaaaaattattcttcatgtatctgaaattcaaatttaaatgagcctcctgtatttttatgtgctaaatctggagactctaatctggaagtatctcttcaactgagcctgtctcattccttcctccaaaaaaaagttcgagaaaagttttcattaagtggcattatgtcatttctactgcctcctctacctaaatccaataacctcaaatgggtattctaaggttattggttattaaccttttatttcactcattcttttctcctcctcctcctcctccccctcctcttcctcctccttcttcttctccttcttcttcttcttttttttcttttctttttttttttttttgagacagggtcttgctctgtcacccaggctggagtgcagtgctgcaatcatagctcactgcagcctcaatctcctggctggagcaatcatcacaccttggcctcccaaaatgctaggataatcctggggcctctctccttggcttctagatggctgtccaccagccatctacatctggtggtcagccaccacccccagccgctgttttccatcagtccattctaaggttcaaaggtttaaaatctgtccatctagctcagaactcagatgtattttcttcaacatcacagcggagattactctggtccagcggggaggaggttctctgcccacccccttctttccttccttcttgaaggctgagaccgaggagggaaaaaaggaaagataaagagggatcttactgttatggcttgaattgtattctctaaaaagatgtgttgcagacagggcatggtgactcacatctataatctccgcactttgggaggccaaggagggagtatcgcttgaggtcaggagtttgagaccaccctggccaacaccacgagtccctgtctctacaaaaaaaaaaaatatatatatatatatatatataaaataataataaaagataagttacagaccccctcgtccctcagaatgtgaccttgcttggaaatagtctctttttcttttcttttctttttcttttttttttttttgagacagaatctcactttgtcatccagactggagtacagtggtgcaatcatagctcactgcagcctcaacctcctgggttcaagccatcctcccacctcagcctcgttagtggtgacgacaggtgtgcaccaccacactcagctaatgtttctgaattttttgtagagatgaggtttcgccatgttacccaagctggccttgaactcttgggcttaggtgatctgcccaccatggcctcccaaagtgctgggattataggtacgagccactgtgtggaaacagggtctttagaaaggtaatggagttaaaatgatggccgggcgtggtggttcacgcctgttatcccagcactttgggaggccgaagtgggtggattacctggcgtcaggagttcaagaccagcctgaccaacatggcaaaagcctgtctctactaaaaatacaaaaattagccgggcgtggtggcaggtgcctgtaattccggctactcgggaggctgaggcaggagaatcgcttgaacccaggaggtggaggctgcagtgagtccagatcatgccattgcactccagcccggaaaagaagagcaaatctaaacaacaacaacaacaaataagttattagggcaggtccttgtcctccatgactagtgtccttataaaaagggaaaatggctaggcacagtggctcatgcctgtaatcccagcacgttgggaggccaaggtggggggcggatcacctgaggttgggagtttgagaccagcctggcctcccaacgtgctgggattgcaggcttgagccacagtgcctgactagaagtgttaattttgaggagtgagacatctaggtgggtaagacaaagctgggaggcatccaggtacctacacacgtatttaaagccatgcagctggatgacatt[142 bp omitted]tctactaaaaatacaaaaattagctgggtgtggtggcacgcgcctgtaatctcagctactctggaggctgagacaggagaattgcttgaacccgggaagtggaggttgcagtgagccaagatctcacgactgcactccagcctgggtggtagagtgagactccatctggaaaaaaaaaaaaaaaaaaagaagattaaagactgagccctggggctctctaagacagaagggtctcttaaaggaccaatctgatgagagggaaaaaatctttcgtcacaaagaaaacatccatttacaggagactagttaactaaattatgggttttgatatcgacatggaatgctccacaggcattaaaaaaaaagatgacaaaagctctgagtcaccatttggattctccagaacagatcctgagaaataatttggggtgtgagatttttattgggaa[143 bp omitted]ctactaaaaatacaaaaattagctgggtatggtggcgggtgcctgtagtcccagctactccagaggctgaggcagaaaaattgcttgaacccaggaggcgcgggttgcagtgagctgagatagcaccactgcactccagcctgggcaacagagcgagactccatcaagaagaagaaggagaagaagaaggaggaggaggaagaaagaagaagaggaagaagaggaggaggaggaggaagaggaagaagaagaagaaagaaagaaggaagaaggaagaagaagaagaaggaggaggaggaggaggagagctaggcttggtggctcatgtctgtaatcccagcgctttgagaagcagaggcaggtggatggcttgagcctagagtttgagatcagcctgggcaacatagggagcccccatctctacaaaataaaagaaagaaagagagagagagaaagaagaaaggaaaagagggagggacagaaggagggagggaaggaaggagggagggagggagagaaggaaggaaagaaggaaggaaggaaagaaggaagggaggaaagaaggaaggaaggaaggaaagaaggaaggaaggagggagggaaggaaggaaggaaggaaagaaggaaggaaggaaaggaagggagggaggaagggcagacagaactgggcaaagggagaagttaaagtggtattgagcatggacaaagccttggctaatcggcgagggactctggagccagtgagccccatcagagcatcccacatgaagtcagaatacccaggcctttattcctctgcctcacccagtcactggctgtgggctgccctgggacagatgagactctgagggaggtggctctctgcacctgaaggtgatcctaaacatggaagctggaggtttctgctcaccatacatcccttggctgggcagtaagtcccttcttaaaaggggatctgggggctgggcatggtggttggcgcctgtaatcccaatactttgggaagccgagatggaacaatcacttgaccccaggagttcaagaccagctcaggcaacatagcaagacctcgtctctaccaaaaatacaaaaagtagcccagtgcggtggtgcatgcctgtggtcccagctattctggaggctaaggcaggaggatcgcttgagtccaggagtttgaggctgcagtgagccatgactgcactaccgcactccagcctgggtgacaaagtgagaccctgccctgtgtcaaaagaaaaaggaaagaagggaagggaaggagaggggaggggagggaagggtccgggcgtggtggctcatgcctgtaatcccagcactttgggaggctgaggcaggtggatcacaaggtcaagagatcgagaccatcctggccaacatggtgaaaccccgtctcaactaaaaatataaaaaattagctggcaccaacatggcacatgtatacatatgtaacaaacctgcacgttgtgcacatgtaccctaaaacttaaagtataataataataaaattaaaaaaaattagctgggcatggtggcgcatgcctgtaatcccaggtactcgggaggctgaggcaggagaatcacttgaacctgggaggcggaggttgcagtgagccgagatcgtgccgctgcactccagcctgggtgacagagcaagactccgtctcaagaaaaaagaaagaagagaaaagaaaggaaggaaggagggagggagggagggaaggagggagggagagagggagggaggcagggagggaaggatggaaggaaggaaggaaggagaagaaaaaagaggatgtgggtgctgcagaaggaacactccatgaaagcgggggttgttctctgttttctttgcatttgtttgctttcttttataggaacaaaaacaacaggagctgtaccccaatgctgtgtacatagtaaatgctcagtaaatatcaatggaataaataaacaaatttcctggctcctcggcagccaggtgtggccatgtgagcagatctgagccaatagagaatttgtgtgtcagaatcaccctaccaactctggatgccaacctccagactgtgactgggagagaaagtcatgtctatcttgtcagtcattggtatttctctccctcacagtcatacctaactatataattaaaccagtgaaggcactcaataaatatgagttataggccgggtgtggtggctcacgcctgtaatctcagcactttgggaggctgaggcgggcggatcacgaggtcaagagatcgagaccatcctggccaacatgatgaagccccgtctctactaaaaatacaaaaaattagccgggcctggtggcgggcacctgttgtcccagctacgcaggagtctgaggcaggagaatcacttgaacctgggaggtgggggttgcagtgagccgagattgcgccattgcattccagcctgggcaaaaagagtgaaactccgtctcaaaaaataaaaataataataataataaataaataagagttacaatccataatatggatacttgataatttggcttaaaatttggccaggcgtggtggctcatgcctgtaatcccagcactttgagaggctgaggcaggaggatcgtttgagatcaggagtttgagttctgcctggacaacatagcaagacccggcccttaccaaaaaaaaaaaagaaattagccaggtgtattgtatgcacatgtggtcccagctactcaggaggctgacgcaggaagatcgcttgagcctgggaggtcaagactgcagtgagctgtgattgcgctactgcactccagcctgggtgacagagtgagatgctgtctccaaaaattaaat[144 bp omitted]tactaaacataccaaaaattagccgggcttggtggtgggcgcctgtcgtcccagctactcgggaggctgaggcaggagaatggcgtgaacctgggtggcggagcttgcagtgagccgagatcacaccactgcactccagcctgggcgacagggcaagactccatctcaaaaaaaaaaaaaaaaaattcaagccatttaagtagtcccctcttacaaggcatttatttgcaattctttgctaacgtggccatgagagactatctccagagacagccgccatcactttccatcctgttatgcccctgccactcctccgccgagtctatttcatctcctcttccccttgaatttgggttgggctatgtgacttgctctgaccaatggaatgtggcagaagagctaccatgtgacttccaagccaagcatttaagaagacaagtagcttttgctaactctctctgaagtcagttgccatatggggaataaagaccaccataccatgagggagcccaaacagccatgtggagagagagatgactcactggggctccagatatgtgagtggagaatgttccacttgtggatattccagccccagaaaatcctagctgagcccagtgcagattctcaaattatgagaaatgataagctgtggttgtttcaaactcctaagtttaggggcggtttgttacacagcactaactaactgaaacacaggtgtatgaacaactctgccataagctactttggggtcaaatcttagtgcacaggtgcacacctttgatcatttcctaaaaacaaataactggaagtgggttctgtgaatttgaaatttggtgtcaactttgttcccagagaagctgtagcaatgtccatgagccattcattggtgcatccagcatttcatccacagcctcttcagcactgagagtttccttttcttttcctaattttcaatttctatcatttcaataggcccatttgcattcattccagagaaggtaacagtgatgacagcttctctctgatcatggagtgataaccaaaaaccagtagggcaggttgatttggagccaagagccaaaatactcattcattcagaacttactgagcaaggtttggaggaatgaaaacaacacattaaatatttatggagtcctggtgtggtggctcacatctgtaatcccagcaccaagaggccgaggcaggtgtgaggatcatttgaggccatgagttcaacaccagcttggacaacataagagaaattctgtctctataaaaacagaaacaaaaattagctgggcgtggtggcttgcgcctatagtctcagctgcttggcaagctaaggtgggaggattgcttgaacccaggaggtcaaggctgcagtgagccatgttcacaccactgtactctagtctgagtgacaaggcaagactctacttcaaaaaaaaaaggagacaaactcaccttcaactctttccctctgttgacatctcagcgctttgggaggccaaggtaagagggttgcttgactccaggaatttgaaaccagcctggacagcatagtgagactctgcctctacaaaataaaaataaataaataaagttgtttttcttctatttcagatcactatccactttaagtcgtggttcttggctgggcatggtggctcacacctgtaatcccagcactttgggaggcagaggcaggtggatcacctgaggtcaggagttcaagaccagcttgaccaacatgctgaaaccccatctctactaaaaatacaaaattagcctggcgtggtggcacgtgcatgtaatcccagctacttgggaggctgaggcaggagaattgcttgaacctgcaagggagaggtggcagtgagctcagatcacaccattgcactccggcctaggcaacaagagcgaaaccccatctcataaaataaaataaatacaataaaataataaaataaaataaaataaataaaataaaataaaacagtggttctcaggccagctgtgatggctcacacctgtaatctcagcactttgggaggccgaggtgggcaaatcacctgaggtcaggagtttgagaccagcctggccaacacggtggaaccccatctctactaaaaatacaaaaattagccaggcatggtggttcatgcctgtagtcccagctactcaggagtttgaggcaggagaatcacttgaacccaggaggtggaggctgcagtgagccaagatcacaccactgcaccccagcctggacaacagagcaagagaccatctcaaaaataaaataaaataaaataaaataaataagtaaataaataaataaatagtgattctcagctgggagcgactctgccccctggaggatacttggcaatgtctgagatactttttactgttaggggggcattttttttaattgatgggggtaggggtgggggtgctcctgttatcgagtgggtggaggccagagatgctgctcagcaccctacagtggcctgggtggccttttgtactttcaaagaattctccaactcagattttcaatcgtgccaaagttgaaaaaccctactttaagtgaaatgcaatagaacaggatcaaatagaatagaaaatatcaaaggacattgctcaaataataagtttcattttataagacttttgtatttttgtgtactcagacactatgtaagat[137 bp omitted]atatcgataccttgtctctacaacaaaaactttaaaaacaggagaagtgtcactccctctccctctccctctcccccctctccctttccccacggtctccctctccctctctttccacggtctcccactgatgccgagccgaagctggactgtactgctgccatctcggctcactgcagcctccctgcctgattctcctgcctcagcctgccgagtgcctgtgattgcaggcgcgcgccaccacgcctgactggttttcgtatttttttggtggagacggggtttcgctgtgttggccgggctggtctccagctcctaagtgcgagtgatccgccagcctcggcctccagaggtgccgggattgcagacggagtctggttcactcagtgctcaatggtgcccaggctggagtgcagtggcgtgatctcggcttgctacaacctccacctcccagccgcctgccttggcctcccaaagtgccgagattgcagcctctgcccggccgccaccctgtctgggaagtgaggagcgtctctgcctggccgcccatcgtctgggacgtgaggagcccctctgcctggctacccagtctggaaagtgaggagcgtctctgcctggccaccaccccatctaggaagtgaggagcgcctcttcccggccgcgaccccatctgggaggtgaggagcgtctctgcccagccgccccgtctgagaagtgaggagaccctccgcctggcaaccgccccatatgagaagtgaggagcccctctgcccagcagccaccccgtctgggaaatgaggagcgtctctgcccgacagccaccccacccgggagggaggtgggggtcagccccgccaggccagccgccccgtccgggagggaggtggggggggtcagccccccgcccggccagccgccccgtccgggaggtgaggggcgcctctgcccggccacccctactgggaagtgaggagcccctctgcccggccagccgccccgtccaggagggaggtgggggggtcagccccccacccggccagccgccccgtccgggagggaggtggggggttcagccccccgcccggccagccgctccatccgggagggaggtgggggggtcagccccccgcccggccagccgcctcggtccgggaggtgaggggcgcctctgcccggccacccctactgggaagtgaggagcccctctgcccagccaccaccccgtctgggaggtgtacccaatagctcattgagaacgggccatgatgacaatggcggtttggtggaatagaaaggggggaaaggcggggaaaggattgagaaatcggatggttgccatgtctgtgtagaaagaggtagacacgggagacttttcattttgttctgtactaagaaaaattcttctgccttgggatcctgttgatcggtgaccttacccccaaccctgtgctctctgaaacatgtgctgtgtccactcagggttaaatggattaagggcggtgcaagatgtgctttgttaaacagatgcttgaaggcagcatgctggttaagagtcatcaccactccctaatctcaagtacccagggacacaaacactgcggaaggccgcagggtcctctgcctaggaaaaccagagacccttgttcacttgtttatctgctgaccctccctccactattgtcctatgaccctgccaaatccccctctgcgagaaacacccaagaatgatcaataaaaaaataaataaaataaataaataaataaatagactggacaccctactacccatacccagtttaagatacagattacaaccaacaccgttaaagcccttttgcatgcccttctccatcccagccccctcctaaattttgtttataatgatctcgcttttcttcataattttacctccaaaatatgcatctgtaaacaatatgctgtttttgcaagcttttgaacattatataaaataaatcatactgcatgtaaaaaaaaaaaaaaactttaaaaacattagcaggtcctgttggcgtgtgcctgtggtcccagctacttggtagactgaggttgggaggattcacctgagtccagaagtatgaggctgcagtgagctatgcaccagagccaaacaagatagcagaatgttctgcagacaatagaaaaagaaacaaatgaattaatgcaattgtttatgatgaaagtcacaccaagatgaaaattaaacaaggcaaatgttctagagtgcctgggatattagcaaaggtgttcagggaaggcttctct[132 bp omitted]tctcctgcctcagtctctcccaagtagctgggactacaggcgcaggccaccatgcctggctaatttttgtatttttagttgagacggggtttcaccacgttggtcaggctggtcttgaactcctgacctcaggtgagccgcccgcctccgcctcccaaagtactgggattacggccgtgagccactctgcctggcttgactccaagcagagtaaagcagaggctttgtggctggattgagcttgatgtgtttggggtgtgaaaagcagaccagggtagggaaggagataaggggggtcagcaggggggacggggaaccgcagttcaatttaggtttctcagccaagcgcggtggttcacacctgtaatctgaggactttgggaggctgacgcacatggatcatttgaggtcaggagttcgagaccagcctggccaacatggtgaaaccccatctctactaaaaatacaaaacttatctgggcgtgatggtgggtgccagctactcaggaggtcgaggcccgagaatcgcttgaaccggagaggcagaggcttcagtgagccgagatcgcttcactgcactccagcctggatgacagagtgagaccccgtctcaaaaaaaaaaaaaaattagcttttttggggatctcttagagtgaagaatagtgaagaagagacagtaggtcacagtgacgtgggtgatactggagcacctgttagggagctattaacaatgaagaaggtgaaaagcagttgcaatggggagaagtgaagctgattaaacaaagggagacagggaacacatctaagaggaccccgccatcccacgtcagaggcagggcaggcagggggtgcagggcagcgtccggaggagtgaaggagtggaggagtggaggagtggctgcagggatggtggcagctgttgtcctggcccttctccccagggcgggggcaggagctgcagccctggggcaaccggccgggcagggccacccacctgactcacagcagaaactgggacagcagctgccctcctacctcctcaatcccagctggaaataaaagtaagattccagacctctggccaacaccctctgagcccaaatgccggctttccaccgtgaggccctgcctgccagcgctggctgccatgtgggctttctgctttgcggacctgcaaggtattctcctaactctgtcaccttcaactccctccctctgtcttactcctgattctacaaaactgggagtgtctgtgtccccttctatctccccatcggactgcagtcccctcgaggttacagagggcacaaaattattcttatctagggtacccagcatcaagtttaagagtccagtgtcccagctacttgggaggccgaggcag[214 bp omitted]catggagaaaccccgtctctacttaaaatacaaaattagctgggcgtggtggtgggcgcctgtaatcccagctactcgggaggctaaggcagaagaattgcttgaacctgggaggcggaggttgtggtgagccgagattgtgccattgcactccagcctgggcaacaagagcaaaactctgtctcaaaaaaaaaaaaaaaaagagtccagctgggcatgatggttcatgtctcagcagtttggaaggctgaggcaggaggatcacttaagtccaggagttcaagaccagcctgggcaacatagggagaccctgtctctacaaaaaattttaaaattagccagatgtggtgacatgcacctctagtcctagctacttgggaggctgaggtgagaggatagcttgagcccagaggttcaaggctgcagtgagctctgatcacaccactgtgctccagcctgggtgacagagcgagacactgactcaaaacaaaaaaagagtctaccgcttactgcttggtaaacttcttatacatcaaaatccacttcaggagtctctctgaatctgctgtgattttttttttttttttgagatagagttttgctcttgttgcccaggctggagtacagtggtgtgatctcggctctctgcaacctctgcctcctgggttcaagtgattctcctgactcagcctcccaagtagctgggattacaggcattcaccaccatgccgagataattttgtatttttaatagagacggagtttcactgtgttggtcaggctggtctcaaacccctgtccttaggtgatccacatgtcttgggctcccaaagtgctgggattgcaggcatgagccaccacaacacctcgcctgaatctgctgtgattcgaaggactgccccgggaaaaaaaagaaaaaaacacttcaagtagactcccatgtgggaggacctgaagacttctcagacttccatggtccctgatctaacacagcaataaatcattcaaactgagcactttttacacatttttggaccctttctgaggactttctgcacaaacctaggaggtaggttatcattatccccactctgcagatgcctccaaagccctctacctacctcctttatcacctcttcatctcttggttcaatgtgtatttaatgagcacctactgtgtgtcaggcactattctagactttggggatgaagcagtgggcacctcttagatagtgacattgaactgaatgatgaaaaagaatctggcttgagaaggtgtggcaaaaaagagaagtcccaacattaccagcaatcttcctacttccaccattttgcccattctttttcctctgctggaaatgcctttccccagctaacaaactcctacttatcctgcaaagcccaattccaatacctgcttctcctaggaatgctttccggtctgatctccaggaagaatccacaacacccttctctgggctcccacaatctactccacaggtggccaaaaaatgaatgaggaggtctcagtagaagtcggccacaccaggctggaagctcttcaaggccaagacccaggctaagtcctctctgggacccctcttccaagatgagctgtgggaacactgcagcttttttttttttttttgagacggtgtctggctctgtcgcccaggctggagtgcagaggcgccatctcagctcactgcaagctccacctcccaggttcacaccattttcctgcctcagtctcctgagtagctgggactacaggtgcccgtcacctcgcccggctaattttttgtatttttagtagagacgcggtttcaccgtgttagccaggatggtttcgatctcctgacctcgtgatccgcccacctcagcctcccaaagtgctaagattacaggcgtgagccactgtgcccggccctgcagctatttttaaaataaggaataagtggggtgtggtggctcatgcctgtagtcccagcactttgggaggcaaaggtgggaggatcacttgaggccaggagtttgagaccagcctgggcgacatagtaagaccccatctctaatacatatatatatatatttgccagatgtggtagcacacaactgtagtcccagctactctggagagcaaggtgggagggagggttgcttgggcccagaaatttgaggccacattgagctaggatggcgccactgcactccagcctgggccacagagtgagattctgtctcaaaaaaataaaaataaataaagcagaaacagtagaaaacgaagacgaggccgggcgcggtggctcacgcctgtaatcccagtactttgggaggccgaggtgggaagatcacgaggtcaggagttcaagaccagcctggccaaggtgaaacccatctctactaaaaataacaaaattaaccgggtgcagtggtgtgcatctgtaatcccagctactggggcagctgagccaggagaatggcttgaacccagaaggcagaggttgcagtgacccaacatcgtgccaccgcactccagcctgggtgacagagcaagactccgtctcaaaaaaaaaaaaaaaagaagacgaattggtcggtaaggggactcgaactggagactctaaaacttctccagccctgcccactcaatttacttcattggctcctccctttcaggctccgtccctatccccgcctcacccttaatggcgcccgcccagactcctggaagtgagcggcctagcgagcgagctcccaggcgcaaagcacgccggaagctgtagttccgccatcggacggaagccgaccggggcgtgcggagggatgtggcccggaatattggtagggggggcccgggtggcgtcatgcaggtaccccgcgctggggcctcgcctcgccgctcactttccagcgcagcggccgccgcagcggacactccagaacggcctggccctgcagcggtgcctgcacgcgacggcgacccgggctctcccgctcattcccatcgtggtggagcagacggtacggcggccgggcggggacacggttcgggggctccgggctgggtggggatcggctggctgccccggcccctcacctccatctttctacccccagggtcgcggcgagcgcgcctatgacatctactcgcggctgctgcgggagcgcatcgtgtgcgtcatgggcccggtgagcgccccgcgccgggaccctccccaggactctcccaagcgcctgccgacactccctgcgcccctccttccctggccccagactttccctcaggctccgctccccttctaacccccttccctccccttctgactcccctcctggctcccggtcccccaacccgctcctcaccccttctctgctcctcggctcttaatctccgacttccttcctgacacctggcaccgctcccctcattcctacgctcaagactctccccagccattctcaccccttcctttcctgtgtccctagccccctgactccccccttcctgtgctccaaaccccctgggtcctctccactactctctccccatccccttctggggcctaaattcttccccatcccttttactttgggctctggtcccccttcctggttccctgacccatccccagcctcccttaaaactctctccccaccccgaatctggggacacccctgccctctccacctgcagatcgatgacagcgttgccagccttgttatcgcacagctcctcttcctgcaatccgagagcaacaagaagcccatccacatgtacatcaacagccctggtgagcagggtctttcctgggtgccaggggcactcgtcagggcacacgggtgactcaggggaccagaatcccgggtcagggatgttctctctctgggaaagggtgcagagcgtcagagttccagaagtggctttaaaccaccaaaaggtgcctgttgctggcttttgagcctcggttcacaagtcaggatgtggcctctttgatcctgcacatactgttctgccaacctgacccggctgacatttaaaaattggtagattttaggccgggcacagtggctcacaccggtaatcccaacactttgggaggctgaggcgggcggattgctcgagctcaggagttcaagaccagcctgggtaacgtagtgagaccccatctctacaaaaaaagtacaaagattagccgggcaatgtggcgtgtgcctgtagtcccagcaactcggaaggctgagggagaaggatcacttgagcccaggaggtcgaggctgtagtgagcccatctcaaaaataatcataattggtagattttttccccctccccaaaaaaagtagtcaattttgattgagcacttatgatggaggcatttttttttttttttattgagatggagtctcgttctgtcacccaggctggagtgcagtgttgcaatctcagctcactgcaacctctgcctccttgggttcaagcgattctccagcttcagcctctcaagtagctggggattacaggcatgtgccaccatgcctgtctaattttttgtatttcgtagagatgatgtttcaccatgttaggctggtcttgaactcctgacctcaagtgatccacccgcctcagcctcccaaagtgctgggattacaggcatgagccaccacgcctggcctgatttctagtttctcttggaaatttagtagatctgatcccatggtccactggcacatctggcaagagtcagctgactgtaaagcaagcgctctgccttttgcctgcacctgggccgtgtcacttgtttttgtcacctcccaacccctggaagcatttgtgtttgtgaaccctgctttaaagagctgcttctagaccggacgcagtggcttacgcttgtcattccagcactttgggaggctgaagtgggctgatcacttgaggtcaggagtttgagagcagcctggccaacgtggtgaaatcccatctctactaaaaatacaaaaattagccgggcatggtggtgtacttgtaatccagctactcgggaggctgaggcaggagaattgcataaacccgggaggtggaggttgcagtgagctgagatcgcgctactgcactccagcctacgtgacagtgagactcagtctcaaaaaaaaaaaaatagctgcttctggctgggcatggtggctcacacgtgtaatcccaacactttgggaggattgcttgagcccaggagttcgagatcagcctgggcaacatagtgaaagcagtgaaacccagtcttaattttttttttttttttttgagatggagtctcgttctgtcgcccaggctggagtgcggtggcgctatctcggctcactgcaacctccgcctcccgggttcacgccattctgctgcctcagcctccggaatagctgggactacaggcacccgccaccacgcccggctaattttttgtatatttagtagagacggggtttcactgtgttagccaggatggtcttgatttcctgaccttgtgatccgcctgcctcagcctcccaaagtgctgggattgcaggcatgagccacagcgcccagtcatattaatttttaaaaaaggaggggggctgcatctgttccaccctccccaggtttaggagatggaatagggaaagggtcggggggagctggtccagcccctcacttgctcccccgcccacaggtggtgtggtgaccgcgggcctggccatctacgacacgatgcagtacatcctcaacccgatctgcacctggtgcgtgggccaggccgccagcatgggctccctgcttctcgccgccggcaccccaggcatgcgccactcgctccccaactcccgtatcatgatccaccagccctcaggaggcgcccgggtgagtgccagacacgcgagctgctgttgggaatcaggacagggtctagacagaaggactgactgggcggaagtcaagcgtgggaggggatgtttttttttttttttgagatggagtctcactttgtcgcccaggctggagtgcagtggtgcgatctcggctcactgcaagctccgcctcctgggttcacgccattcttctgcctgagcctcctgagtagctgggactacaggcgcccg[138 bp omitted]ctgggccagccgggagtggatgtcttaaaatgtgcaggccaggctgggtgtggtggctcacgcctgtaatcctagcacttcgggagacagaggcgggaggatcacgtgagctcaggagttcgaggccagccaggggaacataatgagaccttgtctctattaaagaaaaaaaaaaaaaaggccaggcatggtggctcacgcctgtaaatcttgacactttgggaagctggag[131 bp omitted]tgagataggagaatcacttgaacccaggaggtggaagtgagctgagattgcgccactgcactcaagcctggatgacagagcaagactctgtctcaaaacaacaaagggaaaaaaagaaaatgcactgaggagttgtttgctgtctcttgagaattagcttcagctgggcacagtggctcacatctgtaatcccagcactttgggaggccaaggcaggaggatcacttgaggccaagagtttaagaccagcctgggcaatggtgagaccccatctctaccaaatatttaaaatgactcgggcatggttatgcttgcctctggtcccagctactcaggaggctgaggtgggaggattgcttgagcctgtgaggtgaaggctgcaatgagctgtcttgtaccactgcattccagccccagcaacagag[131 bp omitted]gcaagaccccatctctaaaaaaaaaaaacaaaaaacaaacaaaaaaaaggcttagctaatgctgagacagagagacactgttcctcccagtctgcaaggcttcagatgcagaaaataacatatacttaatccagtcagaaagccttcctggtagtggcaagactgaagcaggatatcgggggatttacacaaccccagcccaccagcctcaaaccggaagcccaaagcccagggaagctcctgagtgccacctccagcctccctgtgaggggctgacgccgataccaacctttaccccctcactcccttggacgtccctcagggccaagccacagacattgccatccaggcagaggagatcatgaagctcaagaagcagctctataacatctacgccaagcacaccaaacagagcctgcaggtgatcggtaagcaccctcctttatttcatcctggtccgtgcacagacggaccaggcgttgctctaagccagggcttctccacctggcccctgcggactttcagggctggatcgttctctgggatggggggaccatcccagaggtcagcctggccaacatggtgaaatcccatctctactaaaaatactaaaaatggtgtacttgtaatccagttactcgggaggctgaggcaggagaatctgtggaatatgagagtttgaggttacagtgagctaatttttttgtttgtttgtttttttgagacaaggtctggctctgtcgctcaggctggaatgcagtggcatgatctcggctcattgcaacctctgcctcctgggctcaagcaattctcctgcctcagcctcctcagtagctgggactacagggatgcaccaccatgcctggctaattttttgtagagacgtggtttcaccatgttgcccaggctggtctcaaactcgtgagctcaagtgatccagctgcctcagcctcccaaagttctgggattacaagtgtgagccaccacgcccagccataattttattaaaatcaaaaagtgaggccaggtgtggtggctcacacctgtaatcccagcactttgggaggctgaagtgggaggatcacttgagttcaggagttcaagaccagcctgggcaatatagtgaaaccccatttcatagaaaagaaaaaaaaattttagctgggcaccatggctcacgcctgtagtaccagcactttgggaggccgaggtgggcggatcacgaggtcaggagttcaagaccagcctgaccaacatggtgaaaccccgtctctaccaaaaatacaaaaactagccaggtgtgttggcacacgcctgtaatcccagctactgaggaggctgaggcatgagaatcgcttgaacctgagaggcggaggttgtagtgagtcgagattgcaccactgcactccagcctgggtgacaaagtgagaccctgtctcaaaaaaaaaaaaaaaaaaaaagtgaatgttccacagcatcacagatgaattttgcaaatatgttgcatgaaagaagaataaacactctgtgattccatttatttaaactataaaaacaaggagagctaatttatgctgttagaggagtggttgctttggggtatggggagggggtggcaaggattagtgactgtcgtgggcccaagtggggtttcaggggtgctggcattattccatctcttggtctgggtgctggtcctgtagggtatgttcagtctgaaaatccatcccaccagacatttacgaatcatgccctttcctgggtgtatattatacatcaataacaatttttttttttttttgagatggagtcttgctttgttgcccaggctggagtgcagtggtgcagtctccacctcccagatttaagtgattctcatacctcagcctccctagtagctgggattacaggcgtgtgccaccacacctggctcatttttgtatttttagtagagacagggtttcaccatgttggccatggtgaaactttgaaggccaatggtgaaacatgaggccaaactcctggcctcaagtggtccacccacctctgcctcccaaagtgctgggattacaagtgtgagccaccgtgcctggcccaataacaattttttaaaaaacaaaattgaaattggtattttactgatacctaggggaaactgaggcactgcagaatgaggacatgtctcagtcagcttgagctgcttaacaaaacaccacagacctcaacagagatttatgtctcacagttctgggggctgggaagtccaaggtcagggtgccagctgattcggttcttggtgagtgctctcttcctggcttgcagacggccgccttctcgctgtgtcttcacatggtggagagagagcaagtgcactggtgtctcctcttataaggccactaatcccatcaaggggcccctgaccccatctctcctaatgacttcccaaggaccccatctccaaatcccatcccactaggggatggggcttcaacatatgaacttggggtggtgggcacaaacattcaggccaaaacaggacccagacctggccctgggtctctgctcttaccctaatgtgtctcacctcctgcttccccaccagagtccgccatggagagggaccgctacatgagccccatggaggcccaggagtttggcatcttagacaaggttctggtccaccctccccaggacggtgaggatgagcccacgctggtgcagaaggagcctgtagaagcagcgccggcagcagaacctgtcccagctagcacctgagagctgggcctcctctccagaatcatgtggaggggccagaggcctgccagacccccagctgggccctgctcaccccttgttgctgggcttggaggggcctcttgaggaacttttaatttgcaggggtgcccgctatggacggggcattccagctgagacactgtgattttaaattaaatctttgtggtctttgctctgcgtctgggacaccctcccttctgcaccatgacagcgtgtacacatctgtgtttcacaggccccttctgcttttgtcctgaccccaagaggcaagccatgtcttccttcaacagattctcctgatcatatcctatattccaggcagtgttcttttgtgaagaagacacaagaaaccctcctcaaaagagctccat[133 bp omitted]catggtgaaaccccatttctactaaaaatacaaaaattagccgagcgtggtgcacctgtaatcccagctactccggaggctgaggcagaagaattgcttgaacttaggaggtggaggttgcagtgagcaggatcacgccactgccctttagcctgggcaacagagcaaggctctgtctcaaaaaaaaaaaaaaacaaaaacaggaaaggtggcatgcaagtgtgagggtaagcgtgttacagttttttatggggtaatcagggaagccctcactgagaaggtggtggttgagcaaagcctcaaaggaggtgaggggtggagcctgtgtccaggcagagggcacagccagtgcaaaggccctgtgacaggactgtacctggcatgtgaggacctatgaggaggcccgtggctgagggaaggtggaagagaggagatcaaaaagtagaggtgaaaattagccaggcgtgatggtgcacttgaacccgggaggcagaggttgcagtgagccaagatcacgccactgcactccagcctgggcaacaaagcgagattctgtctccaaaaaaaaaaaagtggaggtgattgagaatagatcataaaaggcctgacatctaaaaggagggatgtgaaccatggagggttttgagaagaggaaggaaaataaggatgactatgactcctgaggagtgcaccatgagcagaaactggagagcagttaggatagttggagtaatctagacgaaagctgatggcagccctggccgagtgatgagaaaaagtcagattctagctaggtgggatgtgacagagagcagtttccagaaactccgagctgatggcccaaagcaggaagatggagacctgtcgcctgagatgggaagtgtaggcaaaggaacaggcttggggagggatcaggagttgattttggatatattatacctgatgttttgatatgtccctcgacatcagggtcaagaggttgaaataaaaacgtaggtgtcatcggccgggcgcggtggctcacgcctgtaatcccagcactctgggagaccgaggcgggcggatcacgaggtcaggagatcaagaccatcctggctaacagtgaaaccccgtgtctactaaaaatacaaaaaattagctgggcgtggtggcaggcgcctgtagtcccagctactcgggaggctgaggcggcagaatgg[133 bp omitted]aggctcattaacagtcagactgagacctggctattggattcggcattgtggatgtcactggtggccttaaatcaggccttttctggtgctgtgggagccaaaagccaggctggagtggatccagaaaggataggaggaaacatatcagacatagacaagtctttcgaggaattacactatcaaggggagcagagggtgggggggcagatgtagctggagggagaaatggggtcaatatttttcaaaatgcaagcattcgggccggggtcgggggggcgctacgctcagcagttacagtgttgcagtttgcattatgcacatttaaaatacatacaaaagtacccagagctttgagaggctgaggggagaggatcacctgagcccaagagttccaggctgcagtgagctatgatcgtgcccttgcactccagcctgggcaatagagggagaaaataataaaataaaggccgggcatggtggctcaggcctataatcccagcactttgggaggccgaggcagacgggtcacctgagatcaggagtttgagatcagcctggccaatgtggtgaaaccctgtctctactaaaaatacaaaaaattagccgggcgtggtg[132 bp omitted]caaaaaaaaaaaaacccaaaaaccaaaaaaataaaaaacaaaaattagttgggcgtggtggcagcttcccgtaatcccagctactcgggaggctgaggcaggagaatcgcttgaacccggaaggcagaggttgcagtgagccaagaccgcaccattgcactccagcctgagtgacaagagcgaaattcggtctcaaaaacaaacaaaacaaaaaagctgggcatgatggttcgttgcctgtaatcccagctactcgggaggctgaggcatgagaatcacttaaaccccagaggcagcggttgcaaatcttcagggcctgagatcgtgccactgcgctccaggttgggcgacagagtgagactctgtctcaaaaataaacaaataaaaataaatataaacaaaagtagagaaaacagggtaatgagaccccacgtacttatcacaccaattcaacaattaattcacggtcaaagatgattcttccctacccgccccctccctgcccccacagcctggatttatgtggaagcaaatcccagagatcttttttctgtaaatatttttttttcagtttgcgtttgtaaaaaacgatgactcttttttttttttttgagacaatgttttgctgtgtcgcccaggctggagtgcagtggcgggatctctgttcactgcaacctccgcctcctgggttcaagcaattctcctgcctcagcctcctgagtcgctgggattacaggcacgcgcgccaccaagctcggctcattttttgtattttcagtagagacgggttttcaccatgctggccaggctggtctcgaactcctgacctcaggtgatccacccgcctcggcctcccgaagtgctgggattacaggcgtgagccaccacgcccggccgaggaatcaaaaagacaaccataatgccattttcaaacctaaagtaatagtgatacggagacggggaaatgaatgatacctcgctctgacctttgaccataagccctaactctggatagctggccccaccacacacataatcgtggccttgacgtcagtcccctgaccccggacccttatctcggcctgactgtactctgcccttaacctctagccctagtcgactccataaccgtggccttggccccagtccccctgacttccggacttcagaccagatactgcccatatccccttatgaagtcttggccaggcaacccctagggtgtacgttttctaatgattaaagaggcggtgctaagctgcagacggacttgcgactcagccactggtgtaagtcaggcgggaggtggcgcccaataagctcaagagaggaggcgggttctggaaaaaggccaatagcctgtgaaggcgagtctagcagcaaccaatagctatgagcgagaggcgggactctgagggaagtcaatcgctgccgcaggtaccgccaatggcttttggcgggggcgttccccaaccctgccctctctcatgaccccgctccgggattatggccgggactgggctgctggcgctgcggacgctgccagggcccagctgggtgcgaggctcgggcccttccgtgctgagccgcctgcaggacgcggccgtggtgcggcctggcttcctgagcacggcagaggaggagacgctgagccgagaactggagcccgagctgcgccgccgccgctacgaatacgatcactgggacgcggtgagaccggcagcgccgggggcgagggacgggggctcgtcgggggcgcggcctggggacgtggagcatcagatggggcggggacacgctgggggcggtacctagagcggggatttggagcggggacagaggagacgagcgccgggaccgggcagggccacactgggggcggttacagtaccgtttagcgtgggggcggggctacggtgctggggttgtggggccaggggggtcgggcgcagggatggggcggggccacgctggggcggggacaaaggagacagcgcagggatggggcgggggcactctgggggcgggacaggaggcgagcgtagggacggggcgtggccacgctgggggcggggacagtggggaccagtgctgggatggggcgtggccacgcttgggggcggttacagcgcagtcgagcgtgggggtggggccagggagtcgggtgtagggttggggtgcgattacgctgctagcagttacagtgcagaagaacgtggcggctgggattggggcgtggtcaggtcgtcgagcgcatggatggggcggggccaagcttggggcggggtccgtggagtcaagcgccgggatgggttggggccatgctgtgggggggacggggaagtcgaggtttagagagggcagaaccacgctgggggcggagataggggagacacatgctgggatggggcagggcctttttggggtcggtagctattgcagggatttgggagctgggctatggtgggggctgggctgaaactctggctgtgggaggggcgggacctgggggatgaggaccttggggtcagggagagcacttttgcgacctgggaccaaggttaggggcggaaacggatgtggagccagatgatgttgagagacagagacaggacacttgggtggggtcaagttgtagggagattcagccaattgaatgctggggccgggccagcattggggacctggaattgtagcctcagggtgagtactaaggactgaggtcacacctaggtagggccatagttgaggggctaggggagtttgagttgagggcagggtcaagagtcacatagggaaaccagccccttgccgttttctgcccctccttgcctcagtttccttgttccctctgggagctcccaggcttaaccgagctctctgtgcaggccatccacggcttccgagagacagagaagtcgcgctggtcagaagccagccgggccatcctgcagcgcgtgcaggcggccgcctttggccccggccagaccctgctctcctccgtgcacgtgctggacctggaagcccgcggctacatcaagccccacgtggacagcatcaaggtgggcagaggacggtgccttggcactcccagccagggggtaggcaggcccggttagatcctgacccatccccacgcctcttttgcagttctgcggggccaccatcgccggcctgtctctcctgtctcccagcgttatgcggctggtgcacacccaggagccgggggagtggctggaactcttgctggagccgggctccctctacatccttaggtacctccatccaggcagcacccacccctccaagaatgtgccatccgcccaccctgtgccctgggtactttccctcaatccagccctccccgaagacgcctttaccccagggtctgtgtgggaggcagcagggggctggaatccaggaggctggaatccaggtctgcctggagcaggggctgccctccttgcacccagtcacagcctgtttcttcctgcaggggctcagcccgttatgacttctcccatgagatccttcgggatgaagagtccttctttggggaacgccggattccccggggccggcgcatctccgtgatctgccgctccctccctgagggcatggggccaggggagtctggacagccgcccccagcctgctgacccccagctttctacagacaccagatttgtgaataaagttggggaatggacagcctaactgggacattgcagtggctgcttgctggggccgggatttgcaggggaacccaggatggcactggcccatagggagctccaggtgtggctggctggacacatggtcaaagtcacaaggccgggagagtggtgtcctttattgcactcactgctggtcgccccagcccactcccctcctcgttgtctctgcatccaggtctccaataaataagtcagccgagctcccccagcactgcagcttctgggtgccaggccgggcaccctcagccaccacagccgcaggcagccgccgagagctggggcagccgctgccagcggtggcggtcatcgaggaaggccacgtcggtgtagcgagtgggccggcagcagggcccgccgtgggctcggccctggccctgcagccgggccagcgccaggccatgctgggtgcgggcaccacgggggcagctgccggcgcagtagcggaagatgaccttctcctctgaggcgtagcccaggcctagctctgccacggacagggtcaggctccacagctggcatggaccagacagggctcggcgcaggcgggcaagggggcggtgggtgcctgtgggagggaagggcgctgacagtgagcagggtcagggctggggaaagttgggaagtcacagagggtccctggaagtccttacccagccaggtccctccagcctttgccacctgttcagacgagaactctccatcggccacgggaaccccacgggcatcggggccccagccctgtcccagctgcagggacaggagcagcagggagcccagcaggaacttccctacggccattgtgacgggcaggtcctgagagtgggagctgtgccccaaatttatgccctgcctgggctgggagctaacctcttcactgccggcccctgcagccaggaggccccacgtctgcaccagcccatctcctgcaccctcgaatccaggcatctgctccttctgccccacaccccacccttctaagagttaagggctcacccccagcctaccccaccccgacattccacacagccatttccgacgccccagacaccccctgatttacgagtgctgtgctggcggccagggcaggcaactggtgttcccccgacctgctgcctggagtggaagtcagggggcttcatgggaccccggtggggtccctccccactaagtcagggtgctggggctcaggagcccccacgtgtatcatgtgccaggtggagcatatgtgagtgctgggaaaggtggcttggcaggggactgagtccacgggaaccctccatggtggctcccgcctggaggattaggacatcatgcccctgtctccgggcctggctgagccagcatcaaaacaggaaaagggagaggcctggggacagccaagggtggggacacaaggggacagggacgcctgtctcgggaaggccaacctgagacccctataactgcagccccatcctgggatctgagcatgtcagagcccccggggcgatggaggctgtccaggtcatggtaacgtctagcacgatgcagacagataagggctctcgaggcttccatacccagccccgtgtgagcccagtcccctcaccggtacaggggagctcctcagaacccctcctactcggcttggtgaggaaagagatgggcacttagagtgtaaggcagtgcccgtagcttcgaatgcaaaaacaagcaaacagcttgtgattgtccgaaggggtgcttgactctaagcacccacaagattggggaaaatcagaaaaccctcacacacaacccgtgtgacccaggtgcaccctgtgctgttggtgggggtgtaaattgctagcagctctttggatgagcagctgctactggggaattgtaaattacaccctctgccccaggagccctgtttgcggggttcctcccacacaggcaagtgaaacagccagcacagggacatctgatgccttcttcatattaggaaagtctggaagtggcctcaactccatccgtgagggattgcttcgatgattatgttgtggtttttcttactgaagtgcttattgagatgataattttccgatggaaagaaaagcctgggcttggcgtggtggctcatgcctcgggaggctgaggcgggtggattacctgaggtcaggagtttgagaccagcttgaccaacatggtgaaatccatctctattaaaaatacaaaaattagctgggcatggtggtgggcgcctgtaatcccagctactcgggaggctgaggcaggagaattgcttgaacctgagaggtggaggttgcagtgagctgagattgtgccattgcactcaaacctgggcgacagagcgatactgtctcaaaaaagcctggcggggcccagtggctcatgcctataatcccagcactttgggagggtgaggtgggaggatcacttgaggtcgggagtttgagaccagccaggccaa[141 bp omitted]aactccgtctctattaaaaaattagctgggtgtagtcccagctactcgggaggctgaggcaggagaatcgcttggaacccaggaggcagaggctgcagtgagccaagattgcaccactgcactccagcctgggcagcagcatgaaactccgtctcagaaacccaaaaaacaaattagctggaccgtggtggggcgtgcctgtcatcccagctactcaggagactgaggt[133 bp omitted]aacggtcctggtatttgaacccaggtcctccgtgaatgcaaaacccctgctcctcaccacagggcctcaccacccagcctccttacatgaaggcccaggcagtgggggtggctggggcgaaactgctgaggcagcggctccctccagagctgcctccctgctgcccaagaaggcctggtgggagaagggggagggaggttggcctgaactgggacattccgaggaattagccagacatctcaggcattcctgctcggcagccaagggctgcagaactgggtggggaagacttccacctgcaagtttccaaccaccggcaagacagaagggattgcccggaagatgggttcaaaagtagtggctgcaggcaaattccatttccagccatattaatgtttccagccacattttccagttccatttccaggaactggaaaagccctcccttacagaatgcctggcaacgccagatcaaatatatgcatgaccgagcttgtaagaagggagaagccccccgaaacatcaccgggaacctcaaacatagggacccacaatcggggcagtggggggggttggctttggtggccacctgcaagctgagaaccacacacaaaatgggctggggctggcgctcctgggtagctagcgaaagccaaggctgaaccatctggaaggactgcctgcaaagtaggccaccccggattcccacagagcccccagctggccatgagcatccaatcccaaatcacaagaaaatctatcactaaggggagtcagaagaaacaaaaggatgcccgggaacttcagcttctaggattgtcagacctcagtcaggatgagtaaaataaaaacatcagccaggcgtgggtgggtgcagtggctcacgcctgtaatcccagtactttgggaggacgaggcaggcagatcacctatggccaggagttcgagaccagcctggccaacatgctgaaacaccgtctctactaaaaatacaaaaattagccaggcgcggtggcgggcgcccgtaatcccagctactcgggaggctgaggcaggagaactgcttgagcccaggaaccagaggtcgcagtaagccgagattgtaccactgcactctagcctgggcaacaagagtgaaactctgtctcaaacaaaaacaaaaacaaaacacattagccaggcatttaatggtacacgcctgtggtcccagctactcaggaggctgaggtgggaggattgcttgagcccatgagttcaagactgacctgggcaatacagtgagacctcacctctacaaaaaattaaaaaattagctgggcgtggtggtgtgcactacttgaaaggttaaggtgggaggatcgcttcagcccaagaggtggaggttgcagggagccaagacggtggacactgcaatccagcctggtgaacagagcaagaccctgtctcaaaacctaaaatataaataaaaataaaaccatgaaagatgggaccaaaacataaggaataagacattatccaaacagagtagcagatctaaaaaggaaacaaagaaatctgagcaatttattattattttttatttattgagacagagtctcactgtcacccaggctggagtgcagtggcgtggtgtcagctcacagcaacctccacctcccaggttcaagtgaatctcgtgcctcagcctacggaacagctgggacaacaggctcccgccaccatgcctggctactttttttttttttttgtgccaggatttcattctgtcacccaggctggaatgcagtggcaccatcatagttcactgcagccttgaactgggcttagcctcccaagtagctgggactgcaggcgctcaccatcatgcccagccaaaactgaagacttactgggctatgtggtggataagtcacagctgaagagagacttagggaagtggaagggagaactgtagaagttacccagtgggcagcacaggcccttggtcagtgtgagggaggccgagccaggaggaggaggacaataagaaggcctaacaggcatctgaagattccagaaggaagggccagaggaggagatggcttaacttttccagaattgctaactacggggccctgggagtcagggagcaagcaggatgtcgaagggtcactgagagcctgaagttctggagggcagagccatgtattggacagagcctcactctaggatggcgaaggggcagtgagagccttaagttctggggggcagagccatgtattggaccaagcctcactccttgagggagaagtgcattttgtcgttgatcatcttgcgctcggggttgagtcgcttgaggatctgggccaacacgttcactgtctgctcgctgctcagccctgtcttcttggtctggaactttttcagcaggtccttagtggtcatgggcttccgtgtcaggtagcggcgcacggcatcctcagtcacctgcacgtcgctgaggatgggaggacggggaaggtggcatcagtgagattgtccccagtagcccttgccctgccccctgctgtcctcgtcaacttacccgctgttgggtgttgtcttgcctgatggtggctggggtgtcgacttcccagacaggctctggggtcccgtgtccagccgcaaccgcttggctgcaggcatctcgctcacccgcttccctgtgggagtggggtcagggctgagtcttgcaggcaggaggcagaacccctgggcaggaccccaggctgggcagtgccaggattagggttcaaggggatcagggagagacaggcctccacccgcatctccatcccctctctgtcctgagccccaacagaggtcaggaggctgtggctgtggctgtggggagcggggaggccacgggcactcaccttgctcgagtttgctggcagccgcccgcagggtggaggaggtgctgccaccctctgcgctgggcgtgcctgggcggctgttgccccttgagctccctcccgacggcttccgctctctcttgggtggcgtcttcttcttctgcagaggtcagggttgggaggtgggtgagtctgcaaacagacgcccaggcctcccccgccaccgggctgggccttaccgccatgaagagggctgaggaggcctcgctgtcaatgtcgctctcctctgagctgtccgactcctcgctgctgtctgcggggcacaggaaaggggtcagggccagagcaaccccgggacccggtgcccactggtgcctccactgcagatgagggaggcctgcaggggagaggggaggaggtggcagggcgccagggcccgacccaagcctccaatatgggggccacatgcgccgcacctttcctgcgcttcttctcctgcggggtgggtgccttcttctcctcctcctcctccttgtcctcctcaggcggcttctcctcctcactctcctcactactgtcgctctgctcatcgacacctgggaggggcagggtatgagcaagagcagggaagcaccgcccccatctccccggcccgcccagccatcgcctacccttgggcccctcctcctgctgcggcgccttggccttgctctcaggctcttcttgggagctactgtaagacggggatggcaaaggatgagcgcgcgctcgcgaggctgcatggggtctcgcaggcgcctcccgtcggcctcacctggagccgtctgacatgtagtccacctcttggccctcgaagtccccatcatcgctgtcctcgaaggcctcgtcgtctgaacccttcttcttcttctttttcctgccgcccttggccagcggcgccttcttcttggccttggggactctgccccctgggaagggaggaaaggaaggaaaggagggaaagtgaggaggaaggcagtgggtatttattgtgtttttcacattttgtgcagttttgacatcctggggggcctcactgactggggagactacacctccagggccagcccaggagctcagctctcctaaacaaactcccggcagaccccacacccccacccaccttctctagcgctcacagaccactccccctctcccagaccacccgggcgaggcacctgataaccagggacacagcccctacagcccggagcgcacaggagttattgaaactggtcaacctagagttgcagtttctcataggaacccccgtaaaggccacagccaggccaggtgcagtggctcatgcctgtcatcccagcactttggcaggctgaggcgggaggatggcttgagcccaggagtttcagaccatcctgggcaacacagtgagtgagaccccagtctctacaaaaaacacaaaaattaggccgggcgtggtggctcacgcctgtaatcccagcactttaggaggccgagacaggcagattacctgaggtcgggagtttgagaccagtctggccaacatggtgaaaccccatctctactaaaaatacaaaaattagccagcatggtggtgcatgcctgtagtcccagctacttgggaggctgaggcaggagaatcacttgaacctgggaggcagaggttgcagtgagccgagattgcgccattgcactccagcctgggcaacagagcaagactctgtctccaaaaaaaaaaaaaaaaattagccgggtgtggtggtgcacgcctgtagtcccagctactcaggaggctgaggtgggaggatcgtttgaccctcggaggtcaaggctgcagtaagctgtgattgtaccactacactccagcccatgtgagagagagagagatcctgtctcaaaaaaaaaaaaaaaaaaaagaagggccatggctcagctctcccgggctctggccttgcctcctgactgacatcactgctcctccaggcggcctcgcctgactctcattcttttttctctgagacggagtctctctctgttgcccaggctggagtccagtggcgtgatctcggctcaacacaacctctatctcacgggttcaagcaattctcctgcctcagtctcccgagtagctggcactagaggcatgcaccaccatgcccagctaatttttgtgttttcagtagagacacggtctcactgtgttggccaggctggtctcaaactcctgatctcaggtgatctgcctgcctcagcctctcaaagtgctgggatgacaggcgtgagccactgtgcccggccccacttgcctctcattctagggccactgtgagcgatggtagactttgccttcactggcactgcctgagcaggcacctctgtgacctaatgcccaggcgcccgtactcaccctcctcaccactggcatcactggcatcggacgacatctccaggtcgtcctccaggtcgtggatgcgcagctcgctcgccttcctgcggccacgtttctccttctcctcctcatcctcgtcctggtcctgatccttgagccgccgctgctgcatgatgctgaagtggttcagcaccttgttcctcctgcgggccaggcacaggggggctcatgccgggcctggcaccaccctgcatctgtgcttgcagggggcgagccccagggcaccacccacatagccttcaaggtgatgtggcccccggggacttgggctgtggcacaggactccctgaaaccacacggatagagccagcccttcctgccttcccgttctgccccgagtccctcaaagagcaggtccccatgtgctgctggagtctcagcacctccctcggactcagagtctggccccaatccagtcacactggtttcttgctattttttattattatttttttattttctgagacagagtatcgctctgtcgcccagactggagtgcagtgatgtgatctcggctcactgcaacctccgcctcctggcttcaagcaattctcctgactcagcctcccagatagccggggttccaggcgcctgccaccacgcccagctaatttttttttttttttgtatttttagtagagacagggtttcaccatgttggacaggctggtctcgaactcctgacctcatgatccaccttggcctcccaaagtgctgggattacaggtgtgagccaccgtgcccagccagatcttttgttatcttaatttatagatgtatttttctttaatgacaaaacatactgtttccattggaacaatgtaacgttgt[145 bp omitted]gaaacctcatccctacaaaaaattaaaaaattagccgggcgtggtggcatgtgcctgtagtcctgactactcaggaggctgagggaggagaatcaattgaacccaggaggcagaggttgcagtaagctaagattgccccacagcactccagcctcggtgacagagtaagaatctgtctccaaaaaaaaaaaaaggactgcatttaataggaatgcatctaacatgggcaaggcccaggctggtgtgaaagataatgaaactgctgcttaacactgtgagtggctttaccacactgagccatgcaccaaaaaacagtgacagtttggtgcagtggctcaagcctgtcatcccagcactttgggaggggaggccgaggctggaggctcgcttgaacccaggagtttgagaccagcctgagcaacatggcgagacaccatcaccatttgttcttttcttttcttttcttttcttttgagttggagtcttgatctgtcaccgagactggagtgcaatggtgtgatctcggctcaccacaacctccacctcccgggttcaagcaattctcctgcctcagcctcccgagtagctgggattacaggtgcccgccaccatgcctggctaatttctgtatttttagtagagatggcatttcaccaaattggccaggctggtctcttggccaggctggtctcgaactcttgaccttgcgatccgctctccacgtgcccagcctgaacagttcttagctaagtagatttaacatctgatcaagagatggcattctggccgggcaccatggctcacacctgtaatcccagcatattgggatgccaaagcgggcagatcacttgaggccaggagttggagaccagcctgggcaatatgctgaaaccccttctctactaaaagtacaaaaattagccaggtggggaggtgcacgtgtgtagtcccagctactcgcaaggctgaggcagaatcgcttaaacccaggaggtcgaggttgcaatgag[132 bp omitted]taaaatgccaaattcttctccctaaaacttacaaagcagattctaaggaaaatacagcaaaagcgaacctgcccccccagcaatgattgatcgactgattttacagtggagccccaggaactcaaccaaagtggagcaggcaggcagacctgggggctgttgttccaggggagcaggggtacagaaactgccccacaggctcggaggctcatgacctggtggggaggacgctctgacttcgtgccatttaccggggttgcttttggagctgagccaacctatgactcttcaga[143 bp omitted]accaaaaaaatagaaaaaaattagccgggcatggtggcaggcgcctgtagtcccagctacccaggaggctgaggccagagaatggcatgaacccgggaggcggagcttgcagtgagctgagatcgcgccactgcactccagcctgggtgacagagcgagattcggtctcaaaaaaacaaaacaacaaaactaaaacaggccgggcgtggtggctcacggatgtaatccccacacttagggaggctgaggggggcagatcacctgaggttaggagtttgagaccacctggccaacatggtgaaaccctgtctctacaaaaaatacaaagttagccaggcgtggtggtgcatgcctgtaatcccatttctctacttgggaggctgaggcaggagaattgcttgaacctaggagtcggaggttgcagtgagctgagattgcgccactgcagtccagcctgggcaacaagagcgaaactcagttcaaaaaaaaacacacaaacaaacaaacaaacaa[132 bp omitted]ctcctgcct[175 bp omitted]cccagccgaaaaaggtgtttttttaacctttgggagccatcgactctttgagcatctgctcatctgtgacctgtgcaaatgccatttgtagatgcgtccagagtgccctccccaccatctgcaagcaccctagggtggtggtggccctacggtctcatccaaagccatacatccaagaccaagtgctctgggcccccagcctcgtccccctgcccacagtcactctgcactggcctcatgcactgtgtccctccacagcccttaactgcacccgccccacctctgaggccgatgtcactgctagagaaaccctcctcgggtgccctgcctggagctgctgccctgcagtggatcaggctgtgtgacctgcagcctgcggaaagccaagggggcagttagaccccaccctgctctgccaatttgagctccgggtcacagactctggctctggcagcaccctctggggtgccccattgtggccctaaggcctcctatctgtttcctcctgaactgacagctctgagacggccgagtggggtctgccctggttacccctgagtccccagctcccagcacagggcctggtgatatatccatggcaaggcaccccatttccctcacttctgtccccagccaccacccagcccactcacctctcccactcctcctcggcctcctcggcagtgagcgtgcgatgccgggccagcggtgtgaaattgtaccagttgtgcacggggaaggcctcgaaggccccgtcggggcactgggtgaagatgtagtaggacgtgttctctgttacgcctcccttcttgatgcccttgaacctgcagggagccacggtcatggcctggcccatagggaccagccccagcccccccgtgtccccccggggcctgcctcctttatggcacttgccataggaggaagaccaagaaatgcccatgaggcctgggcaggcccttcaaccacctgggcctcgtcaatttccacatctggggaacagggccggcgcacctaccctgcaaagtgctgggcgtgtgcacatcgggatcatttctggaaagactgtgtgagattatctcaggagagcccaaccctgcagtcaaactgtctacatttgcctccagctctgctatctgtgggccacacccgggaaactgaggagccaagtgagaagatggggcgggaaggcatggccaaatttttttttttgagatggagtctcgctctggcacccaggctggagtgcagtggcaccatctcagctcactgcaacctccacctcccgggttcaagcaattctcatgcctcagcctcccgagtagctgggattacaggtgtctgccaccacacccagctaatttttgtagttttagtagagacagggtttcaccatgttggccaggctagtttcgaacccctgaccccacgtaatccgcccgcctctgcctcccaaagggctaggattacaggcgtgagccaccgcgcccagccatggcatggccaaatctgaagtggacacctggcccgggccaccatttcctcaagcctaaacaactgcccagcctccttgaggcctctacctcattcttttctaccccaaagttccggacagtctgggtgagtgcctcttccctgcctacagctttccaaggctccgctggacccagcacatcctggcacccactgccctgtgtgagctgcctgtgtctgtcactatcacccaactgctgtgcctggagcacccttcatcaacctaacctggacccctcctgttctgccctcagtctgccccctctgagaggtcatctcaagtgtcatgagctcccagggctggccacctaagcttcctgcattgtggcactcagagctgcctcagagccaggcacaagcaccaactcagtgaactgtcttcaaaaacacaaccccagggcctgggcagtggctcatacctataatcccagcactttgggagaccaaggtaggaggatcacttgaccccaggagttcaagaccagcttgagcaacgcagcaagaccccatctctaccaaaaatacaaaaattagccaggcatggtggggcgtgcctatagtcccagctactcaggatgctgaggtgggaagatctcgagcccaggagttggagcctgcagtgagctacgatcgcaccactgcactccagcctgggcaacggagtgagaccctgtctcaaaataaataagtaggctgggcacggtggctcacgcctgtaatcccagcactacgggaggccgaggcgggaggatcgccaagttcgagaccagcctgaccaatatggtgaaaccctgtctctactaaaaatacaaaaattagctgggcgtggtggtggcaggcacctgtaatcccagctactcaggaggctcaggcaggagaataacttgaacctgggaggtgtgggttgcagtgagccaagatcgtgctactgcactccagcctgggcgacagagcaagactctgtctcaaaaaaatacaagtaagtaaaataagataacataaataaataaataaataaataaataataaaatcctacagggatggaagtgccagcacttccactgcagcagtgggaatctgaggttcagagagggtaccccacaaagtatgtaagttgaggcctggggatgtggactggtcactaagccggcaccgccaccgccccaccacttacttcctgcctgatttgccgttgacccggagcagccagggctggtcctcgggccggaactccttgaggacgatgccgtacttcttcctccgagcctcctcccgaagcttgcggttgaactcactgcccgcgcccgattcgggcatctcctcctcttggtagattttcttgttgctcaagtcccgctccagccgagcctaggggagcaggaagcaaagcctctcagggtccctggctttgcttgcgcagtgcccccctccaggaacgcccttccttgccctaggccaagctctagattctcaaaaccaacttaccacttggcaacaagggaggagaacggtagcctttgacaaatctgggtaaagggaatttgggcgagccttgcgctctatttttgcaacttaaaagcttgaaattatttccaaattaaaattaaagagaaaaagaccacctggtgaccatcaagcaggccatcggaggcaaaattccttatctgaggaatgtagaagtaattaattagacttccctattatctacagcaggcatctggttccaggattcttttcaaaaaatgtctaagtacctagaatttccacacatctctccagaatgcatgcatatcgaaactcattgtgctgtggctcacacctgtaatcccagaactttgggaggccaaggcagaaggatcacttgagctcaggagtttaagaccagcctggcatcagaatggcttgaacctgggaggcggaggttgcagtgagccgagatcatgccactgcactc[224 bp omitted]gaggcaggagaatggcgtgaacccgggaggcggagcttgcagtgagccgagatcctggcgctgcactccagtctgggcgacaaagcaagactcagtccccaaaaaaaaaaaaaaaaaaaaaaaagaccagcctgggcaacatagtgagatcctatatctatttcctaaaaataaaaaggctgggcatggtggaaggctgaggcgggtggatcacttgaggtcaggagttcaagaccagcctgaccaacatggcgaaacttcgtctctactaaaaatacaaaaattagctaggcgtggtggtgggcgcctgtaatcccagctacttgggaggctgaggcaggagaatggcttgaacctgggaggtggaggttgcagtgagcccaggtcgcgccactgcactccagcctggatgacaagagactccatcacaaaaaaataaaataaaataaataaaaagaaactcattgtgcaacacttgctgacattaaggcaccaaaatctctacaaattaacaatttatcgtgacctacatggctaatgtgatccgaattacccttaagctcttgatttaaggtccatatataccatttccaaaacactctagaatcagccacatctcataacctccactgcctccagtgccctgccaggactcacctagaccagtccagttgcttctaccttggtctccgtttatttgccctcaaacccacagtttgtctccccatagcagccagatcacacacactacaacttcccaattgaagatgctttaatggctcccaaagtcctttctagagcctctgatggcaggggctctgggaaagcccccagcccagtcccctcccttgcccagataaaccatggccaaaaatgtccaacagtgggcacagcttctaaatgttctcctttaaggagaggcctctggtgggcctaccaaacctaacttacagggacacccaggagctaggcctgggcctttgccatttccgtttttttttttttttttttttttttttttttgaggcagggtcttgctctgttatccaggctggagtgcagtcgtacaatcatagctcactgcagccttgaacccctgggctcaagcgatcctcctacctcagcctcctatgtaggactacagacccacgctatcagccccaactaactttttaatttttttgtagagttggggtcttgctattgtattgcccaggctggtctcaaactcctggccttaagcaagcttcctgcctcagcctcccaaagtgctgggattacaggtgtgaactactgcacccaaccctttgtcatctatcttttcttcacttggagaaaagtgagaaaattaagacttagtgactatgacagttaagcaactatcacaaccaccaaggtcagggtcaagttctctcaccaccccagcccctgacccccaggactcagagacttacctgattccacgtagcaaagttgactttgtcggctgcattaaaagccatgatgttatattttttggttgtattcctggagtggatgagaagaggtagtgtcaatccaatacagcaattcaatcattaatttaatcagtcaatgctattgaaccattaattcaatcaaccacccaactggatcgttaattcaatcaaatcattactttaattcaatcactcaattcaattgaaccattaattcaattcaatcattccattcaattgaatcattaattcaattcaattcactcaacaaacccacccagcttcattcagcctgttttgcctggcaacactggatacggaagactccaaggattcccagtctgccagagaagctagacccatcctctcctgaccccaggcagaagaagagcagatggagggacgaagatttgggggaacccaagatgtggagattattgtgaactcagccttggggaggagggaggacaggcagggagtatttcctggaggaggaagatactggagttgagttttgcagaatcatcaagaattcacccagcagagtcacagtttaggggttgaggggaggcactcatggcagaggaacaggatgtacaaaggcctggaaaggaaagacagcctgaccactttgaaacaggacgaggaatatgtccttacagctggcctgggcatcatgggaccatatactcctcgaaggttaggccagggggctggatcaccgtgtattaatgcactcattcattcattcgttcaaaaaagcagtgttgtccccagagaagcctcagcttaatcccagccctgccctccaagtctctcccggtctggagggagaaccacagacagggccagaaatggctggctaagaagatcgtgaaggttttcatttttggggggtggagaggagtgggagatggggctggggacttacttaggaactcgaacgacgtattcagtgacattctggctgctagggccctgcggaaagaggaagcggtgagtgaggggtcgccgaggtcgccgtcggaacccccgaaccccgccaaatccacactcactagggccgccatgggcaatggtcagtggttccgatctggtccgacccgggttcctttcgtctcctctggcgtgcgcgtccctcgatcccggggaagccgccgctcggtgtcgggtctctgtgcctgagcgaggaccccaaccctaggcgcctctggcgctgggaaaaggtaaccggaagaggcgctcaagctactcggtctacgcttctgcggccgcctaacccggaagcgaaaccctcgagcagccgcgtcgcgatggcaaccttcttagcgactgtggccacctcagtgcgcagtcacttatgctcctcggcggctatggtcacctcaaaaggtccaccgcggtccctttttagactcagcaaacctaggccgagtctgagataaactaacgggcctctgtcgctggcgctcttgtatataacgcggttaacttcatcaaatgggggaccgccctctctcgtgacgtcagcacccaaggaccgtggggcatcctgggtgggaagagggagacgaatcccccttgcgggctcccaggcactttgcgcatgcgccttgccgctctggacctggggggcccagaaggccgcgtcaccatagcaaccgaggcctactcgggtcgggtcgaaccgccgcttggctccccatgggtctgtttggggttcatttcctccccctaccccgaaggggtggaccccgtcattcccgcaaaatgaccggggcggggacccttgtgacgttgagccgagccaggaggggtcagagcctgggcggggtcggggcgcgaccaccccaagagctgctggccggatgggtctttgcaagtccaagctgcccgagatgggcagggctctgaggccccaggagaagggtaacgtcgcgggggcggctggctggcttcctggggggaagggaaggaagctgccgagaacaggagggagatgcaggatcccctaccccgttccaggcatgcacacatcccccgaatcatggcagtaacacaactgcgcatgctcacggcgcaaccattcattgctccacttcgcaaatactccagcacctcctgggttcggggccccgcaaggtgaatctgtcaaaccagctccccacggaggattacagtgtcctctcgagggttacagtgtcgtggaagagacagagtcacagcatgggaatctacaacccaggaaggagcaggagaagcacagcggggctctgagggctcagagaagaggggaggtttcagttgggcactgagggatgcataggagttggctaagcaaagggaaggcgggcaagacacaaaagttgggccatgaactacagacaccgtcgatgtgtctgttttcatttatttctcatccaccactaaatgtcaggaaccgccaacccctaggaatataggaatgagggaggcagaaatagtccttgccctcatggagtgt[136 bp omitted]accccgtctctactaaaaatacaagattagccgggcgtggtagcacatgcctgtaatcccagctactcgggaggctgagacaggagaatcgcttgaacctgggaggcagaggttgtggtgagccgagatcgcgccattgccctccagtctgggcaacaagagcgaaactccgtctcaaaaaaaaaaaaaaaaaaaaaagaaggaaaagaaggaaaaaaaaagaacgagtaaacagagaagatcatgacagactgtggccattgctgtggaggaaataggtgtctcagacaaggagtgatggggggaagctctagatggaggctagagaaggccagatggaagttgtggccagaaggaactggggcaggcagggattttccaagcagaggaaacagcaagggagaagtgagtttcaaattcaaagaactgaagccccctggggctgggacaaagagaaggggagtatgggttggggctgggacagagggaaggggagtaggatatggggctggaacagagagaaggggagtatgggatgagactgggagcgtgggcaagtccctgcctctcactgaacctcggttccctccactgtaaaatgggatgatagagtcctcaggatgctttaaggagatgccgtgtgtgaagggcctggcctgctcaagttcacgtctttgtttttttttattttatttttttg[135 bp omitted]cacgcccagctaattttttgtatttttaatagagacaggttttcaccgtgttacccaagatggtctcgatctcctgacctgaagtgatctgcccacctcggcctcccaaagtgctaggattacagtgctaggcatgagcccaccgcacctggccacatcatttttttttttaaatggagtcttgctttgttgcccagtctggagtgcagtggcacaatctcggctcactgcaacctttggctcctgggttcaagcgattctcctgcttcagcctcacgaataggtgtgcaccaccacacccagctaattttttttgtatttttagtagtgatggggtttcaccctgttggccaggctggtctcaaactcctgacatcaagggatccacccgcctcggcctcccaaagtgcagggattataggcgtgagccaccacacctggcctcaagttcacatcttcatccaaagcggcacaaacacacaac[187 bp omitted]cggtggcgggtgcctgtagtcccagctactcaggaggctgaggcaggagaatggcatgaacccgggaggcggagcttgcagtgagccgagatagcgccattgcactccagcctgggcgacagagcaagactctgcctcaaaaaaaaaaaaaaaaaaaaaaagaaccatacccctaagatgccaccctacagcaagagtatgccaagagactttgtccaatgtcactcagggacacctgtgcccctacaggcactaacccatctccctcactcttcctgggcaccacagacattctcaagtcccccctggatggggggcccgggctgtggcaaagggacacagtgcaagaatatggcgaccaagtacggcttctgccatgtggggctggaccagctactgagacaggaggctcaaaggagcacgcagcggggccggcagatccgtgacatcacgctgcaggggctcctggtgcccgcggtaggagctcatgggaggggttagggcggaaggggtaccttgggacaaccacccaccaggagggctcacgggacccagaaggttgcaacttcccatgtggccattgccttgctgcactgaaccttcatttccttatctgtgaaaaggggagatcccatcaaaaggccgtaggggtctggcccagtggctcacgcctgtaattccagcactttgggaggccaaggcaggtgggtcacctgagttcgggagttcaagagcagcctgaccaacatggagaaatcccatctctactaaaaatacaaaattagccgggcatggtggcgcatacctgtaatcccagctactcaggaggctgaggcaggagaatcacttgaacccgggaggcggaggttgtggtgagctgagatcatgccattacactactccagcctgggcaacaagaggaaaaccccgtctaaaaaaaaaaaaaaatcactcactagggaagcgctcactgtttggtgaaatggagggtgccccattcatgaattgcaaataaagatcaatttgagctaaaaaaaatcactcaaggacaggcacagtggctcacgcctgtattcccaacactttgggaggccaaggtctgagcattgcttgagcccaggagtttgagaccagcctgggcaacatagcaagccctgtctcttaaaaaaaataaatttatttatttgagatggagtttcactcttgtcgtccaggctgcagtgcaatggcgtgatctcggctcactgcaacctccacctccctggttcaagcgattctcctgcctcagcctcccaagtagctgggattacaggcacacaccaccatgccctgctaatttctgtatttttagtagaaacagggtttcaccatgttgcccaggctggtcttgaactcctgacgtcaggtgattcactcgcctcggcctcctaaagtgctgggattacaggcatgagccactgtgcctggactaaattatccattaactaatttatttattgacacgagtctcactctcttaccccaggctggacagcaatggcatgatttcggctcactgtaacttctgcctcccgagtttaagtgattctcatgcctcagcctcttgagtagctgggactacatgcgtgcgccaccatgcccagctaatttttgtatttttagtagagatggggtttccccatattgcccaaactgctcttgaactcctgatgtcaagtgatccacccaccttggcctcccaaagtgcaaggatgacaggtgtgagccaccgtgcctggtcaaaacaataaatttttgtttgtttgtttgtttgttttttgagacggagtcactgtgtcgcccaggctggagtgcagtggcccaatctcgactcactgcaagctccacctcccgggttcacgccattctcctgccgcagcctcctgagtagctgggactacaggcgcccgccac[139 bp omitted]acattttaaaaagttagctggtactgcaggaaaaaggcatataataaaaatgaaccaagaaaaattttaaaagaaaaaatttagctgggcatggtggcatgaatctatattccagctacctggaggctgaagtgagaggattccttgagcccaggaagtcgaggctgcagtgagccgtgactgcaccactgctctccagccgggaagacagagcaagaccctgtctcacccaggcgcggtggctcatacctataatcccagcactttggaggccaagacgggtggatcacgaggtcaggagttcgagaccagcctggccaacgtggtgaagcctcttctctactgaaaatacagaaattatccgggcatggtggtaggcgcctataatcccagctactcgggagcctgaggcagtagaatcgcttgaacccgggagatggaggttgcggtgagccgagatcatgctactgcactccagcctgggcaatagacccagactcagttaaaaaaaaaaaaaaaaaaaaggctgagtgcagtggctcacgcctgtaatcccaacactttaggaggccaaggcgggtgaatcacttgaggtcaggagttcaagaccagcctggccaacatggtgaaaccccatttctactaaaagtacaaacaaacaaacaaaaaatcaaaattagctgggcatggtggcatgcacctgtaatccccagctactcgggaggctgaggcaggagaatcgcttggacccgggaggtggaggttgcagtgggctgagctcacaccattgcactccagcctgggcaacagagcgagagtctgtctcaagaaaataaaaaatggctaggtgtggtggctcatgcctgtactcccagcactttgggaggccggatcacctgaggccaggagttcgagaccagcctggccaacatatagtgaaaccccgtctctactaaaaaatacaaaaattagctgggcatgatggtgcacacctgcaatcccagctacttgggaagctgaggaaagaggatcgcttcaaccccggacgcggaggttgcagtgagctgagattgtgccactgcactccagcctgggcaacagagtgagactccatctctttaaaaaacaaaaacaaaccaaaaaaatcactcaacagaattagctagtatttatttcctttgtcaccccgtgaagccacttcctcacccgaaaaatgaaggggaccccagtacctgcctcataacatggtgatgattaaggtacaagcccagcactggcatgcctccttttcagaagcaggtttttgttttgttttgttttgctttgtttgaggagtctcactctgttacccaggccggagtgccatggcaccgtctttgctcactgcagcctctgcctcccgggttcaagtgatttttgtgccttagtctctcgggtagctgggattacaggtgtgcaccaccatgcctggctaatttttgtatttttcgtggagacagggtttcaccatgttggccaggctggtcttgaactcctgacctcaggtgatctgcccgcctcagcctctcagagtgctaggattacaggcatgagccactgctcccagcgtagtttttggatttttagtagagacagggtttcaccatgttggccaggctggtcttgaactcctgacctcaggtggtccatctactttggcctcccaaagtgttgggattagaggcgtgagccaccgcacccagtgaagaagcaatttctttagagcattgtagcagactcagaatccagggcgccaagcagggtatagtcaccctgtcttcacctaaagtccagatggaggaatagaacttgacagggagagccaccttagaaactgatctccccagggtgattcggcggggaaagaagggctcccgggtgctgaattcacccactcccttcccagggcatcatcccagatatggtcagtgacaacatgttgtcccgcccggagagccggggcttcctcatcgatggctttccccaggaggtgaagcaggccatggagtttgagcgcatcgtgagtggccctgaagtgtgggtgtgggtgtgtgcgtgtctgtgtgcatgtgtggaggtgtgaggccatccctccccgcccaccttggataaggctgcacagactagagataagaaaggctgagatacaaggagagaggagatgctgagagggaaatggagtttttttgttatttatttatttatttatttatttatttatttattttttaggcagagtctccttctgtcgcccaggctggagtgcaatggtgcaatcttggttcaccacaacctctgcctcctgggttcaagcgatcctcgtgcctcagcctcctgagtagctgggactacagtaagcacccgccaccacgcagggctaatttttgtatttttggtagagatggggtttcatcatgttggccacactggtcttgaactcctgacctcaagtgatttgcctgcctcggcctcctaaagtactgagattacaggcgtgagccaccatgccggcctgttttttttgggtgttgaggacagggtctcactctgttgcccagtctggagtgctgtggtgcgatcatagctcactgcagcattaaactcctcccacttcagccccccaagtacctaatttttttttttttctttaagacagagtctctctctgttgcccaggctggagtgcaatggcgtgatctcggctcacggcaacctctgcctcccgggttcaagcgattctcctgccttagccccctgagtagttgggattacaggtgcctgccaccacacccggctaatttttttttttttttttttttttttttgtatttttagtagagacagggttttctccatgttggccaggctggtctcgaactcctgacctcaggtgatccacccacctcggcctcccaaagtgcttggattataggcatgagccaccgtgcccagccaagtaccttttttgtttgtttgtttgtttgtagacataggtttcctctatgttgctcaggctggtttctaactcctggcctcaagcaatccccccacttcaacctcccaatgtgccgggagtatgggcatgagaccctgcacctgcctgggaaacagagtgttctattatcaagggaaagtcagggtgttggaagtttctagaacccagatgaggagctagggagctctctgagggcagggaggaagtcatttcagtatcttcctgcccagttcctggcatgtggtgggtgaaccatttgcccactgaatagcgtgtgggtttagcatcctccctaggccatagagagagattcgtgttgttcattcatctgtttatgcaaccacctgtccccgaagtgttcttagagaaagccctgccctcggggctggggatacagagtttacaagatgccgacatcagagtgagaaagagaggcacgaagtcatgcaaaacaaagacatttctgggctgggcgcagcggctcatgcctgtaatcccagcattttgggagtccgaggtgggtggatcacctgaggtcgggagtttgagaccagcctggcgaacatggtgaaaccccctctctactaaaaatacaaaaaaaattagccagtcacggtggtgcgcgcctgtaatcccagctactggggaggctgagctacgaggatcacttgaacccgggaggtggaggttgcagtgagctgagattgtgtcactgcactccagcttggtgacagatggagactctgtctcaaaacaaacaaacaaataaaacctacaaagacatttataatagcagttaagtgcggcgaagaacagaaaacagaatgacatttgggaggaacgagagtgtgctcttttgggctgggtgggctgggtgggctggatggtggcctccctgacgtggatacactggggccctgagtggaggatgaggagctggtgctgggaaggttggagggaatttcttcaggtgattttcacacttccgcgtggcttttgtgcaagcagctgtctgaacacgtgaacagtgacgatactgtggactgaacaaggagggatctttttgattctgtttggaaacagttgagcaggaaaagagaggccgggtgcagtggctcacgcctgtaatcccaggactttgggaggccaaggagggcagatcgcttgagcccaggagttcgagaccagcctgggcaacataacaagacctctgtgtctacaaaaaaaatttaaaaatgagccaggcgtggtggtgcatgcctgtagtcccagctatttaggaggctgaggtgggagaatcacttgagcccaggaagtcaatgctacagtgagatataattacaccactgcactccagcctgggtgacagagcaagacactgtctctaaacaaacaaacaaaacataaaaaaacaggaaggaaaagagaagagaaactgtctgtcaggctacagaccttgaggcttctctgaggcttgttggattccacttaaaatacctttcgattccagaccagcctgaccaacatggagaaatcctaactctactaaaaatacaaaattagccaggcatggtggcgcatgcctgaaatcccagctacttgggagactgaggcaggagaatggcttgaacccgggaggcggaggttgtagtgagccaagactgcacccttgcactccagcctgggcaacaagagcgaaactccgtctcaaaaaaaaaaaaaaaaccttttgaagaagcactttgatggaatcaaaggtcatgggcgccagggcagctgttcccacatgcaggtgggggccctgccctttgttcacacctacattcaaggaattctgttgggctcataattcgttgtgatggggttaaaggacaaatctcaggcccccgcctcaggactgggagttctccgagggcaaaggtcgggctcattcatttctatgcctgccccagcctcaggccagtgcccggaagaaagcaggtccccagctccaccagtggcttctaggtctcagaacagaggctacagaccgtggcatgggcccctttgggtccaccaaagtgttcggtttggactttacagcattttgcattttcctttttgggttcacggccaacattcgacaacagggagcttccacatcaaaactcccagcttctcttgaaaaccgactgacttggcaacgcagggcctgcacgtccccatggcaacagctgcgtgaacgcttcctgagcttttattgagcccagcactgttctcaacactctgcatggatgaactcatcttccggaacgttccaggcattagcatcccgatgttttgcagagcgatcggggagctgcaatagggtcacacaatgtaggtggggaaggcagggcagaagcccaggcaaccccactccttgg[138 bp omitted]tggccaacatggtgaaacctcgtctctactaaaatacaaaaattagccgggcgtgatggtgagcgcctgtaatcccagctactcctgaggctaaggcag[136 bp omitted]tgtaatcccagctactcaggaggctgaagcaggagaatctcttgaacctgggaggcggaggttgcagtgagcagagatcgcatcactgcactccagcctgggtgacagagcaagactctgtctcaaaaaataaataaataaataaataaataaataaataaatagggtcttgctgtgttgcccaggctggtcctgaactcctggcctcaagctcccacctcagcctcccaaagttctgggattacaggcgtgagccaccacgcccagcctccaaggccccaattttaattcctttactgtgcaactgactttgtcacggtcactcctagaggcatttgagtctgcagtgtccctgccttagagtctgtccagaggttcctagtagcacagcatccctggagcctgaaacacagaccatgcctagccccatctgggaccccagctggctcatgcgtctttgtttggtgcattttggtgaagcaggtctggcttgatgatggatccccaggatggagatctctatgcacaagaacacaatgtgcaggaagggtgtggtgattccccttatgattcccactgtcctgtatactccagacaccatggggggccgtcctgggtgaacccactgaaatccatgggaagccaaggttggacacagcctcagcattccagggagactctcgcccctattttacagatggggaaaccaaggcccaaggaggaagggttgcctcctcttaatttttagggctgggtgaggtggctcatgcctgtaatcccagcattttgggaggcagacgcgggtggattgcttgagcccagaagttccagaccagcctgggcaacacgacaaaaccccatctgtacaaaaaaaaaaaaaaaaatacaaaaaaattagctaggtgcagtggcaagcacctgtggtcccagctactagggaggctgaggtgggagaactgcttgagaaccaggagcgttcagtgagctgagaatgcaccacagcactccagccagagcgacaggagtgaaaccctgtttcaaaataaataaataaataaaataagtggttttttttttttttttttctgagagaagtctcgctcttgcccccaggtctgagtgcaatggcttgatctcggctcactgcaacctccacctcccgggttcaaacaattcttctgcctctgcctcccaagtagctgggattaatgcacctgcgaccatgcctggctaatttttgtattttttgtagagatggggcttcaccatgttgggcaggctgttctcgaactcctgacctcaggtgatccgcccgtctcggcctcccaaagtgctgggattacaagtgtgagccaccgtgcccagccataaagtatgtattttttaaaacctttttattaattatagactcacaaggaaatgctgagatag[137 bp omitted]tcctgggttcacgccattctgctgcctcagcctccccagcagctgggactacagacacccgccaccacacctggctaatttttttgtatttttagtacagacggg[148 bp omitted]ggttggagtgcagtggtgcgatctcagctcactgcaacctccgcctaccgagttcaagcgattctcctgcctcagtctcccgagtagctgggactacaggcatgtgccaccatgcctggctaacttttgtattttagtagagagggggtttcgc[139 bp omitted]tcccgctttatttttattttttatttttttttgtcacccaggctggagtgcaatggcaccatctcagctcaccgcaacttctgcctcccaggttcaagcaattctcctgcctcagcctcctgagtagctgagattacaggcgcccaccatcatgcctggctaaattttatatttttagtacagatggggtttcaccatgttggccaggctggtctcgaactcctgacctcaggtgatccacccaccttggcctcttaaagtgcttggattacaggtgtgagccaccacgcccggcctaaactcccactttttacatttcttgctcagtcctggaatgggtcttttccagaagcccttttcgtggtgcaaaattagggttcaaagaatactcgttgctattgggttgtcatcgtttctggatcttcccagtgaacagagctaagaaacacatactcttgaaagagaaaaagaaatcacaagttcattctgatatttcacgttcacgtgacacttacagtgttgttccttcccttttctctttccctaaaaattttggttcttaataccactaacatactcatttgcatcataccattagataccaaatagtttgaaaacaatatgccaacattaactactaagaataaaactatatgtgttgaaacatcactatgtaccctatacacatgtacaattattgggtcaaaacaataaataaaagaataaaattagaaaaggaagtttaagatttctttatagctctcattttcctttattattattatttatttattttagttttcttttttgagacagagtcttgtcctttgtccaggctggagtgcagtggcatgatctcggctcactgcaacctctgcctcccaggttcaagcgatctctggataatttttgtatttttaatagaaatgggatttcgtcat[139 bp omitted]attggttccaggatctgtctcagataccaaaatccatggatgctgaagtttttttgtttgtttgtttttgagacagggtctcgctctgtcgccaggctggagtgtagtggcgtgatctcttctcactacaacctccgcatcccgggttcaagcaattctcctgcctcagcctcctgagtagctgggattataagcatgtggcaccatgcccggctaattttgtatttttagtagagacagggtttct[137 bp omitted]ccaggtacggtaatcacacctgtaatcccagcactttgggaggccgaagtgggagctcaggagtttgaggccggcctgggcaacatagtgagaccccatctctaaataaattacatattcaaagagttaaataataaaatagcatagtatttgcatagaacctatgatcaccctctcatatactgtaagtcatctctagattacttgtaatacctaaaacaatgtaaatgttatgtaaatagttgttatagtgtattgcttagggaataatgacaaggaaaaaattctgggctgggcaaggtggcccacgcctgtggtcccagctactcaggagagtgaggtgagatcgcttgagcccaggagtttgaggctacagtgagctatgattgcgccactgtacttcagcaagaccctgtctcaaacaaataaaaaaaagaattttattttggacattgtgaggtatggggaaaaaaaccagaccctgtcttaaaaaaaaaaaaaaaaagtctatacatgttcaatacagaggcaacttgttttccaaatattttcttttcttttttcttttttgagacagaatttcccttttgttgcccaggctggagcgcaatggcgcgatctcggctcactgcaacctccgcctcctgggttcaagcgattctcctgcctcagcatcccgagtagctgagattactaccacacccggctaattttttgtatttttagtagagatggggtttcaccatgttggccaggctggtctcgaactcctggcctcaagtgatctgcccaccttgtcctcccaaagtgctgagattacaagcgtgagctactgcgcccggcatccaaatattttcagtctgaggttagttgaattcacagatgcagaactcacgcatatggaggaccaactctatcccactatagatgcaccataataaaaatacagggttggccaggcaaccctacataatgaaacctaactgaaacaaatgacccaactatgtatctattgcattccttaattacacagaaaatatatatatatatctttttatatggagtcttgctctgtcactcaggctggagtgcaatggcacaatctgggctcactgcaacctccgcttcctgggttcaagcgattctcctgcctcagcctcccaagtagctgggattaaaggcacgcaccaccacacccagctaattttgtatttttagtagagatggggtttcaccat[139 bp omitted]ccccccactcagaaggctgaggcgggaggatcacttgagttgggtagttcaaggccccagtgagctatggtcacgccactgcactctatctagcctgggtgacaaaagtagaccttgtctgaaaaaaacccaaaaacccataaccagcattcacaagaggtttgggcacagatacaacaatggttagacctggctgtctggggattcctcacgctatcctcttctgtgtgcgtttgcagtatttcattacatcaacttcttttctctgttgtccagactggagtgcagtggtgtcatcttggctcactgaaatctctgcttcctgggtcaagcgattctcctgcttcagtctcctgagtagctgggtctgcaggcgtgcaccaccatgccaggataatttttatatttttaatagagacggggtttcaccatgttggccaggctggtctcaaactcgtgacctcaaacgatctgcccgcctcggcctccctaagtgctgggatgacaggcctgagccaccatgccagcctgtttttttgttttttttaactttgccatatatccatccagaatatctcacatcagtgtcaagagatattccttgtttctttttttacagctgtgtagtattccattgtgtggccacgccattgtatattcagctaatctcctatgggcaataaattactttcaatcctttgccactacagacaatgccacattaaataataacctttgcatgtcatttcacctttttgctagtatccttgaaatagattaggagtggaattgctggattaaagagaaatgcataattttgctagccatcaccagattcctcttcattttacatttacagtgagacctacagaacatgctgccaaggttttggatttttgtcaacctgtgtaggtgagaagtggtatttcagtgtggttgtaatgagcatttctctggctacaattgagttttaatatcttttgcaaagtttaagggccaagctgggcacagggacacatacctgtagtcctagctattcaggaggctgaggtgggagatcgcttgagcccaggagttcagggctgcagtgagctatgatcttgccactacactccagcccaggcaacagagtgagaccctgtctctaaaaatacaaaaagtttgaaaggtgttttgttgtcttcttcagtaaactctttctctctctctctctctctatatatatatatatatatattttttttttttttctgacaggttgttggctttttcctttcttcttttcttttctttttttttgaggcagagtcttgctgtgttgcccaggctggagtgcagtggtgtgatctctgctcactgcaacctctgcctcccgggttcaagcgattctcctgcttcagcctcccgagttgctgggactataggcgtgcaccaccacgcccggataattttcgtatttttagtagagatggggtttcactgtg[135 bp omitted]gtttgggaagactcagctcctttataatgttgagtctttctatccaagaatatatatctgatccttctgtgcaagtatccttttgagtcacttaagaatattttactttttaggctgggcgcggtggctcatgcctgtaatcccagcactttgggaggctgaggtgggcagatcacctgagctcaggagttcgagactaccctggccaacatggcgaaaccccgttcctactaaaaatacaaaaattagctgggcgtggtggtggctgcctgtaatcccagctacttgggaagctgaggcaggagaattgcttgaacctgggagacggaggttgcggcgagccgagatcgcgccaccgcactccagcctggttgacagagcaagactctgtttcaaggaaaaaaaaaaaaaaaagaggaggaaaaaagtattagaaccatatttgcttgcagtgtgcatgcctcatagctttcgaaggagacacaggagcaggtaactaggctgcctccagggagagtgaccctgggtggttggagatggcgagatgcttcactgtgtgtgtgtgtgtgtttggcagtgaatgtcctgtcctctccaaaaagtaaatacgtaaaacttgagctagaaaaataaaacaaggttgggcatggtggctcacgcctataatcccagcactgtgggaggccaagacgggaggatcacctgaggttaggagttcgagactagcctgaccaacatggcaaaatcccgtctctactaaaagtacaaaaatcagctgggtgtggtggtgtgcacctgtaatgccagctacttgggaggctgagccaggagaattgcttgaacctgggaggaggtggttgccgtgagctgagatcgtgctattgcactccagcctgtgcgacagagtgggactccatctcaataaataaataaataaataaataaataaataaataaataaataaaacagaccagggtggcctgattattccttacgtgcccaaataaataaataaataaataaataaataaataaataaaacagaccagggtggcctgattatttcttacctgcccacgtaatcctagatacctggtttctggggaagccggggttctggagccactgtgcctggtccctccacacccagcccccttgttcgggttcctaggtgggccaggcccccagcgtcgtcatcgtgtttgactgctccatggagacgatgctccgacgagtgctacactggggccaggtggagcaccgggcagacgactcggagctggccatccaccagcgcttggacacgcactataccttgtgtgagccggtcttgacctaccagcgcaataacctgctctgaaacgtaggtgctccccgcttctggctcactgcaccccaacccctagggaacaagtctggctttaacagtccagggtcacccgggcctggtcctcgctttcctaccaggtaacctgggggattcccattcccccaggaaatgccttgagaacccagccttggctcacgtgggaaggcaatgggacactggtggggcctccctgcacgccctcacacagcagtcagcaacacaagctttcctgaccctgtcccctctcccttcacgtgcatgcctctgggattttcccagggtctgagcgggagagggtggtgtccctgccgtggggcccagacctgacccctgcggctcccctttctctagatcccggcagaagcagcaccagagaacatctttgccaagtgctgctctgtcattgagagtctgcagtgagacagaggggctgggggtgggccttgcccctcaccggaacccgtgcagtacgtgggaagggtgcgtacctaggaggtgagacctccagaaagggggaccgatgccccctgtgattccagagcaacaggttccctttcccggggtctgtttccccaccagggaggttggccaggggccaccaaggaacatgccccactgggccaggtgcctggcacacctgcatgggtcaggggactgtcaacagccccccctagaggccacagctgttactggctcctgccggggctatcaccaggcccatgagcccaggacatctaagatgaagcgagttttaaacgctggcattcagccacaacctcagagaccctgcagctgcatgcggggctgcaagacacctgcccaggtccaaacagcttgggtggcccctcggtgccctctcccacctcacatccggtcccatcacccagcgagcactgacgcgggcctggctcccacctcagggctctgaacgttaacaggccagaggacctcctgtagcaacagcccatccatgggaacgccggtccctgaggccctcctgagcgccttgctccccaaggtgctggagggaaactgggtaggggaagacagcagtgctgggctcagccagcctccccttcccacatgggaaggggaaagtcttggggggccacaccccactctaattggctgagacttgctcaacttgtttcctctcacaaacacaactgcggccagcacgcagtcttttttaaacaaaaagcactttatttaacaaaaaaaaaaaaggggggggggcacggttaggaaagcacattgagcctgaagaaaactattttatatttttcttaaaaaaaaaaaaacacaaagtttgtaaatttcaatcaccattatcaggctttttaaacaacatctataaagaacaaacatccgcttcaaaactacagggagggaaggaaagggggggagacagacagcacccgcagacggggaggttttgttatcatttatttgtgaagttaaaaacgagcgataaaaagtaaaaactgccatacaattttttttgttgttctcattttgttttcagtttcaatctcctcttgaacagatgaaaagacaacagaccagtcctgggaggggggacgggcggggccgcgggagctgagccagggcgggagggagagaagagggggcttggctgctgggggaaggggtcctgcaatacaacacctggtccaaggaatgttccacctctaactaaaaaaaagaaatagcaagagtgacttttttttttcctttttaaaagtttattttaaaaacaagagggccgagggtgggagaaaatgaattgctttatcctcagagaggcaggttcaggaaggctggggggtgaagaatagagactttttaatatatatatatataattttataagttctgctttgctctttgtgtttttaatttttaagtttttttttttttttggcagagatttagatctcgctatcttctctggctggctcaacatggaaggatcccaattttgaaagaaaaagcatgtgagacacagaacaggcgagagagtgagggcccggcatgcccccaagtcccccccaccctgcttgccgcgagggctccccagtactccccacggcagccatcgctctctcgccaaacaaaacagaagcccccaaacagaacaaaatggaaaaaaaaaagatttttcacagatgaagaagttcacattcattcgattcattgagcctgcggagagggaagagataggaattggtcactacggggagggaagggtgggagactagggggcggaagagaggaggggctggaacaccgtggggggggccaggaagccccctcccaaacctgcgctggctcaggctggaaggacgtgcttgttaactgtctagccaggtgctcgcgggactcgctgaagtcacgctgctccctgatggagaaggagggacagagcaggaagagaggagaggggccgcggagggcggaggcgctagggtcgtaggggagctgccctgtctccggagggcggtggctcccggcgcagcacgacgacatgaacaatccagagatcatggtgtccccacaacacccctgtgaggtaggttggaaggtggcaacgatcttcacgcccacttcacagacaagcccgggacacaggcaagcgcgagcgcatgggaggctgagcccggcggggcaggggcctgggccgctccccgcgtccccaccagtccctgccagagccaggccgcctgcaacacagtcacttggacacaggaaaaaagatcatgggtttaaaaaataaaagaataaaaagaacaaaaaccaaaaaagtgatgcagagaaggggaaaaaatagacgttttcttcccaagtggccagattgtgagcgaggtggtggcggccgggccggtgcccaccgtccgcgctgtctgcctgccccccgactccccagcagttcagaagtcccgcctgcgagtctcagcgctccccagcatcacgacagcggcacacaggaacaagcagccggcgcagggaggcctcttcgtttaacctctggacccagcgaatgcttccctggcggtgcgtggggactcccggagacctccggccacacggcccccgctgcaggcatcaagggcacaccccgcaggggaaggggtttccggcgctacccactaaggcaggatggacggtggccgggggttggaaggagaaaggaggaggaggagggtggcaattcccacttgcctgctgctgtccctgctgcgtgggcggcggctgggggccgccaggacctggggtctgtccgtagtaagcggcctgctgtctgtaatattccgcccaggcggcactgtagtctggctgggagcctgggggagctcctggaccccctccggtggccacttgcgctgtgggtggacaaaggcaggtgagaggctgtgggtgagggctgcccctgcccctgtccccgcatggtggccactcaccttgcttcttgtagtactcctcccaagccttcgtgtagtcctgctgtgggggtgctccgggctgctggggctgctggcctgtgcgggcgccgagacaggtcagaaaccactcccccggcagggctggagcccccccgccaccctgcagactcaccgatctttttgtaatactcttcccaggccttagtgtagtccgactggccggtgggtgggggctgagggggctcaccctgagccggtggggccgcaggggccggtgcggggccggggacggggcccgggggctgctggtagtagtgtgagtagtaggcggcccacgcggcgttggggtccgcggccgctgcagctgctttgcctgcaggagatacctcgggtgagacggggggacagaacagggcctgccctccgccaggtggcccatcacttacttgggtcatgaggagcaggcggctgccactgggggtaggtattgccccagccctggggtgggtactggtgaggagggggccccccggcactgcaggagagaagaaagggatgcttgagcagtggtgcgggggtggccgcagccggaccacctggggtggggatgtttttcagtggggaggcgccagagacccagaccaccaggctcaacggggcgcctgggaaaggcctagacaagaagcaactcgaaggacgcgcagcgtcagcttgaggacatgaaagaagccgcgaaacttgcacgtgcacagagggatgctgaaaggcacatgctctaccagtagacaggagagggcctgttgatggtatccacaaaaatgggctggatgaggccccccgcctgcacttctagggaaagggaaatggggtctgctattcttcttgccagctcagtaagcccccggcctcaaaacccaggaggcagaggatactcactgtgggggagccccgggtggcccctggttgaagggcccaggattgaagggccccattgggccagcagggcctgggccacctgggcctggtccaactgggcagagaggaccctagaaggaaggagagtaaccaaggtaagtgggctgggatccgggctgtgagaccaaatccccagagcccgccccaacccacctcgatcttttcctcgataagctgcttggcgtggtcaatctgctggggtgaaccccggatgatgaacaacttgaagttggggtccccgttgggtggcagctgccgggagatctctacgaaggctcccgtctgctggtttatggctttcacattctcgccacctgcagaaacgcagaaggtgaaggtggcctgcagtgatggcccagggaagagggggcaagggatagggtgcagggggccacactcacctcggccgatgaccagcccacacttgtgagtggggatggagaaggtcatctccccgccagggggaccccaattgccttggcctcttcctcggcctcggccccccgggggcatgcctggaccccctggaggacctgggggaccactctgcaagacaagaggaggaggaggatgatgaaccctggaagccggtctggtcttgcactcccctggaggccctgccagccccttcagcacccggggccacctaccctgaggctctggaggaggtcgttgatgatccgggctgcgtgctcgcacctgtctgggggccccattatatgagcaatcttctcgggccctgtcccgtcatctgaggccagcaccgagagagcagagacacaagtttaaaagaagagcccaccccagagccctgcaacgccgcctccagcgcagacaccacgccggcctgagatctcagacgcgctgcgccgctcccagcctccactcgctcagggattgagggggaggcggcccacattcccagagaaggaaacccacggccaagccaggaggtggctcaagcttcttccagcacacagcacccccagcactgagagattttacagaacaataaatctctgaaaagccagaggggcccttctccccacggcaggcagctcagagactgcctgaggactggcaagagcccagagctgaggtggagtgccctgatccagcctgcggggcacccagggctgtcctgtcaggataggctccatcgtagggggaggaagaggagatctgatagggataggaacacacgttccccctggatgtggaaagccctcatgtgtctgtcccagagaagagaagggactggccatgttctgacggctggactaagagccgtgaggtgctatggaggccacctggctgaccacggtgcccagctccctcagagcctgcctcccaaagagggtgggggtgcactggccaggggcagggtgggccaggccctgaccttgcttgaactgtatccgcacgccagcatcattctggatcttcttgatcatctctccactccggccaatgaccacgccaacagaatgcctgggcactggcacctggggagggaggcagcagcgtcagctcggcccgcagctctgctgccctctgctgcccactggccacaaggagccactcaccccggcccctccctccactggcgggggagaggggggtgaaggcagggcccacactcacatcgatgcctccgccaatccgagatccgtactcattccggtccccaaagccgccttggtcacgttcccggaggatgtccatcaccatctcacaggcttgctgcaaacacacaggaagcagcccccatgggtgagccctgctgccccacacccccccacctcctcgggggtgcgggcctcaactaaggacccacgaaccctgggtgagcccagcacagcaccctactgagctctctacctgccactttaatggggaggcactaccagcagccccgtttccagataaaaaagcagaaggtcagaggtgaggccggtgcctcacacacacaaagctgggagtcagttcagggccatcctacgagccagcgctcttgcaagcctcttggtgttatgaccgactgttcacatatctctctggcggaatgcagaccccgagaccgctggccctgcccacctgcccgtgcctctccagaaccccctccaccaccccagggcgtgctcacctgcactttgtaaggatccccaatgatgcggagaggtttgtccacattcgtattctgagatccgtcctgaattaagatcatcttcactccagcgcgttcctttacaagcaaggttaaccgttagtgctgggctctcccaggacttcctgggctgctgtggtggtggcggtggggtgtggcacacggatgcagaggaagctgcccaggtgctgccctcacctgcagctgcttaatggtctccccgcccttgccaatgaccaggccggccttgcccgcggggatcatgatctcctgcacggtgccgttctggcccccgttggcgttgtcgtggaactgtcctggggggcccccacgaccccgagacacaatgtcatccagcatcatcttggctttcctgggaaggggaggagcgggggatgagcgggtgccaccgctggagaaaggtactggtctggtggcccacccagctcaaagggaaggcgaccccagagtgtgcaaggatgacagggaagaggggccagtcacaggggctgttcaggctccaggttccccaggtcttgggctgccggggaatcagcctcatgttaacatggctgtctggagatgggggcaagaatggaggacatggcgtgcaagttgctcccaactttcaattcaaacggacagagcaggcttctgcctgccccccacatcacaatgagaggccctgtggggacttactggacagattctggggctcctgtcaaggacacactgcgctcgggtaggccaccgctgtctgaaaagaggagatagagtcagtgccctccctggcccacaggcagagaaaggcctgccttggacacgaggaaactttcagaacaaccaagggccacttctgtcccattcagtgcctgacagatcagtttacttcccctaaacacctgggaggctgctcgatgcaaggccaaggttgggaagagatcccagaagggaggtaggactttaagggaaaaggatgaggtggagggagttgcagattccagaaggtccaggagccggccacccccactaccaatgatgaccagagccgcttctatagacaacacgtgctacacgcccaaggaagcctcagaaccccctacccagcaggctttctgtagctcaggactctgagattcgaaaggtaactacattgcctgagagcagatgtgcagccagaaccgggatttgctcctgggcctgacctcagagtgacccctctgtccaaggcaccaccctgtctcacgcagtcttgccggggtgctttcacccacgcggcaggtcagtgcagtgcgtcgaagctcggtgtctggaaccaggcccctgtgcgaaatgctagccctgccacctcagtccatacccacccactgaaaataaaaaaagtcacagctgtgccccgtgggcagtactagtggagtgagatactgcactgagcctggtccgtagtaagcaccaacaagcgccagctcgcttcctgtccacagtccccgtggaaattaagtaattaaaggaaagtgcaaagggcccaaccctggcccccactctggcaggaacctgacgctcttatacctggagaaatctgtactttgcagcctgaatcctgttggattttgttaatttgttcacctcctctgccaatgactggatggagaaagaaggagaaaagcaaagcgtgatgagggaagggagcccaggcctcaggagactgtgtggccggggccccagcccctctgacgttcaggagggcagcagtcctctagagagctcctgtcctctgcccagaggggacgaaggagggacaaatgagaacagcacataggagccctctcagaccagggcttctgggctggcaggagctcacaggacacttcctcctggggaagagtgggcctccccacccaaggtgacccacactcactcaggcccaccatgccgtctgggaccctgtactcttctgtcattgaagtcctgtaaagagacacgccaaaggtcagtcctcaagtgggaagggaggaggacagcagctctggaaggtctacttgaagccaaggccaccataggtctaagcagagtctgaccacacaggccacaaaactgccaaggcctcagtttccccatctgtgccccgagaggcttgctctgggcattgtgggccttggcctggtgccgtcccattgattcagggcgagagggagcactgagtagcaagctgacagtcactctatgtctctcagttctaaaaagctggctgtatgtccttttcatcttattttcctagtattttatgaaactactggcccattaaaaacaaacaaacaaaaaatgacccctgacaactgccctgtgtcaggttcacctcagtccatctggtggggcaaagaggtggcaaagagccctgagctccacagcactgagtgggatgggcacttgcagatgtgtgagggagggaagcaaggccctcctagcctcttccaggaagacgacatttgtgctgctcagagtccccaccccagcggaggaagccatagggtgcggagaccaccctatcactacagtgactgccacgacgctcccctcccacagcccttcagacaaggggtacgaggaacggacacagctcctctgcctcattcccgtctgagcactctggtcaactggcactgggggataaaacctgagagatgtgcccccagtcagagccctcccaagtcagcagaaaggccagtctgctggccaacagacaagaaagcagtgtgggccccaccatggcttaccttgggggaggatggatgggtccaagttgagaactgattgctgtagagagaaaacccaaagcaaagactggcttagctcctcctcgggcacttggcactgcctgccccgggtcagtgggagctgagcccggcaccacggtccccagcctgctccagtgcctcatggatgctgtggattcctccccataaaagcacagagctcatctccctcaatttcagggttcctgggatccctcaaacgtatgggccccagaatgaagcaccaggggcctctgtaaagagctgccacctcctcagtgcttccagctcctgactcctgaaaacctcaaccctctgaagccacatatctgccaccagaccccctggacttacagtctccctgggaagccagcttcttgctctccggttgatctgggaaagagagaggatggcagatgcagcacccacccacccacggccgcctcgaacctgatgctggtgccacatgtccaaggtaaacagtgcccctcggcccccacccttaacaggagctgagacaggagcccaggagagactggcccctgagggaggccagaccccgccaattccgccaccaacgctcagagtaaaaaagccttcagaacacgcaaccaccaccaggcacctgagtcctcccggtttaggacaggacctgcctctagcagggagggtgtcgtggataacagtggagttggtcagggttgatcatccgctacttggggtcacactacgcaccccagagctgggccaacttcacatcaagcctcagtaactgctccaggttgcctcagcctcccagaaagggaggaatcatcttgggaacttacaacttcgacccagtcacaatcaatctgccctcctctctgccacctgatacctcaggatggcagacggaacaagaagaattaacaaggccgggattgctgaggttttaaaagaccaaacaacagtgacacccaccccctctgaaccacactcaaacaaaagcacctctttaggcccccagcccttcctcctaagctaaaggcagcagcagggagttacctccatcttccaactgtctcttttggcccccaaaaccaaaatcaggagtgctgttattcactgtcgtggcagcatcgcctccaattttggctgcaatctagaataaagtagtaagcacagaagaattaccaccaaaaacaaccctccatggcacccaggtcaacttctcagaacatctcctggacacgaaagcccatcaggtcttggtgtctggccctccaacttagggaagagtcagttggttaagacatcctaggagttttgaacctaggcctcaaggttctcaccagttaactgggaatatcaaaattcccctcttcccttctcctgggatttgtgtcttaattgtggccagcccataatccacactgacttcgttctaggggtgacaaggaacagaggctcaggtgtcagggagggttcccaggtcatctccaagagctttcagacacttcctcctgccagtggccccagctcagaaaaccagaaagtgtgtttttttttagccccgttttcctgggatgctgaagagttcaattttcccctatctcccccactctcaaaatccttttatcaatttattgaataaatttgagcaaagcgatcacttcaagggatatgaaatcctcatttgaccaaaacagaagactctctggatggctgggcactgtgacttatgcctgtaatcccagcattttgggaggccgaggcgggcagatcacttgaactcaggagttcgagacagactggctgacatggtcaaactccatctctactaaaaatacaaaaattagctgggtgtggtggtgcacacttataatcccagctactcgggaggctgaggcaggaggagcacttcaactggagaggtggaggctgtggtgtgctgagatcgtgccactgcacccctgcctgggtgatattgagactgtttccaaaaaacaaacaaacaaacaaaaaaccaagactctatgggacacaagttacatctcagacacgtgaagagcaactttaaagaaacctcaacccagcaaacttaggatcagagtctggggtttagaaacccaaaccatgttaagaatctccctttccaccagtctccatttttctacgctgccctagagccaaaactcatgggatgcccacagggggcctgtccccaccaactgacagcaccagcttcctcccttcaagctgtcccagaatcagacggttccatgggcaataagaccaaatgcacgctagaacccacccaactccaagggtgagagagacgacagagggccagaacacaggcgttcacttaacgggacctcccaccttgggaggagccagtctctagccccggaggcattgggacagcccaggagccggtcggcggcaaagtcctcccattctaccgacccccacccctccaggccatggggaggctgcaaatggagctggagaggtcagtcctagcagcatgtgacacttccttgtcattacgcctcaatacacgggggtgggagaccctcccttctttcccccaaagagacagaccacgctttcaagccaccaaagcatccaagagccagtccccatgctcgtcttccccatttcgcccaagtgctcagccctagacaggtccccatccactttcccgactgaagaggaaggactgtccctcccacccccacaatgtccctttctcctagagaggggacagaaatgggactgggttgggggcaaacactgccctttgccctgatatggaggggagagtaaaggccctccgcccgggaaggtggacccctgcctccaggcatgtcctaaggccggggggctaaggggggggtcccaaaagtgcgtctccgagctccggggcgcctgcacacccaggcgccgctcctggtgacccccagtgcgcccctactccctgcaggggggtcacccgttgggatcccactcgaggcgcagcgggagggccaggcccccgcctaccgcccacgtgaccccgcgacggccccggcccccctccgcgaccctgcgcgcgcgcgcgcacgtgacccccgccccctcccccgcctgcgcgcgcgcgcgagcgcgcccctcaggccctcggcctcctcacctggcgggcccgctgcacggcgtcggcgaaagcgtccttgcggattcccgggccgcctccgccgggtggctgagaggggcccccggccgaccccccgcccgggccgccgccgccgggaccgccgccgccccggtcccccgcgcctggcgggcccggcggagggcctcccccggcgcctccggctcccccgcccccgccggcgggcggcggcggcccgggcgggggtcctcccgtgctgtagtccgacatggcgcggcggggccgggcctggcgcggaggctgaagctgaggaggcggcggcggcggcggcggctcaacgcgggaacaaggcctcgctccacacggccgcggagcactctgggaacccagccgctgggaggacgacgaggggggagagagtcgcccctcccgccgccgacgtgacggacgactccggcgggccaatgggaggcagccgccgcaccccggacaccaatcgcgagctctgtaggaggtggccaatcggagtgcaatgaggggcagtgggcgggaggctcagagtgactgacagctctcagaggcaatagctgcgagctgcccgtgctgggcgggcaaatgaaggagatctgagaaggcaggaggcccaatgaaacgcgagtgccagattcgcggggcggcttcagaattagattgacggttctgaagagtcacgtggactgtaaggccgggcctagtggaagactcctatggaccggctgggtgggcgttaggtttgatagtcgtggacacaagccaatgaatgcacgtgagaggtggtgcttgtaaagatgggcagccaattaatccaattcctgacgagttctgggtgatgaggttggctttggactttaattgcttcccttgttaaccagaatccttttctatccctgacttctaagccaatggctgagcgacatgggtgggtgttcggtgactgacactggtctggacaaatgggaatgaaggaaatcaaagcgcccacttttggtgggagccagtggaagcgccgctgcattggggcggagtcggccaccagacagcgaggggattagcgggaactgtagtgaatggcagccgacgtgggcggtggcaatcggctgcccgaactcaggcctgatgtctgggttagctcaccggcagcctggttgggtaggcccggcacgtggcccgcttgaagccttagagatcgagcgcttccggaggtggggaggccggaaagcaggaaactcgggatcccccgggccttcttctctctcgaccccccatctagagcgtccagttctcttgcaggactcaaggaaccagccccactcacgagtccagaaccgttccaacaaccgggatcgagggatcacagcctcgatcacacccctcacttcacacccctcactcccttcgcctaaggccctgggatccaagcctcaagctcctatcctaggtcctcacttcctctcctggacacaaattcccattcaggacccagaggcccaaggtccccagctcccctactgggtccagggatctcatgcacccagttccactcctaggcccaagtatccagacacgttcagcaaaaaccatctctttattccttgttgtgtgacatgttcaccatttcgccctggagccaggacgacccacaaggggccagactggagtccacgtttcttgtctcaggctgcaccctggggagggagtcccaggagttttctgacccagcactgcccccctccacccaccaccaaccccagcttcaggaatcttctgacccagagccccacccccacccccagcctgcttttgccaccaaaaactgccccagggcctgaaccttgaggcctcgagggctctttggggccaggggtcatcaggtcctcctgtcccatttctgcctaggctgtgtcgtccagctcacagcctatatgcccagggttttcttcatggcttcgtacaccacatagctgatgccacctgctggtaagaccttcagtagcgtgggggtcatgcctcggtacagccctagccagccctgctgggccaggatccgctggaggactccgcgcatggtgggatttgagccctccacggtatctgcagggacacaggcaagatcaggactaggccagagatgaccgggcctcctaggagtctggaatgttgcggacaggtgctgaagccacgggtaggggccccaggggtcagtaggaaaacagtttgaagagtcttagaggaaattggtcagtttgaggaggagtgggggagtttctgagtagtagttatcaggattaattttaggaaattttcttgaggggtgggagtggggatagggtctctctctgttgcgcaggctggagtgtggaggcacgatcatagctcactgcagcctcgacctccagaactcaagggatcctccagcctcagcctcccaagtagctgggaccacaggtccatactaccatgcctggctaatttttatatatatatttttgagacgcagtctcaaaagttatcaaaagtgggctgggatcagacacggagggtgccggactcagttttggggtatgagaaaattgagacagccagggtggggcggggaaggggcatgcgtggtggccgctggggacaggctgaccttgggcctgcatcctggtgcgcaccagagtcagtgggtagctggccatctggccacaggtcgtggatagcgtcacagacgacagactgaccaggccactggggtcccccatatccctgcctgacttcacccagaagcactggagcatctgcaagagaagggggccaggagaaagctcactaggagcctgggctccggccagccctgccaccccctctgcaggacccatacctcatagacagccaggtcggtgcaggcataggggatgatgccgagcatattgggcaggtagccgcggtaaagggcgcgggtgccctctcgctgcaagatctgcctggcgcagtccagcagccccttgtactggcccgtccgacgcaaggtcaaccgcgtcttcagcacctgaggatggcggggaacaaggcagctcatttgattgaatcctgtcaatgaccctcggggtagccattgtccccaccctacaaacaaggaaaatgaggctcaggaaggcaaagagctgggtttcagacccggatctgtcagattccatggaatgctctctgaattttgagttctgaagcacaaatgctggcaaaggccaagagagtgagggaagaaggctcacgtctgtcttcccagccctttgggaggctgaggcgggaggatcgcttgaggccgggagttcgagaccagcctgggcaacatagcgagaccccatctttacaaaaaaatcaataaaataaaaataagatgtatatggaaacatcaacatgggagaacagcctggaaaactgattaagaataacagggaagggaggcgagaaaacatgccctcaagcctcaaaaattgaagacagctggcaaaactttatggcaaaaagatcaagcactggggggaaagaaagagagtgaataggtagaaaacagggccttcctagggcagtgaaactactccgtaagatactacaatggtggatacaagtcattatacattcctcaaaacccatagaactgttagattaagagtgaaccctaggtcgggtgcggtagctcatgcctgtaatcccagcactttgggaggccaaggtgggtggaacacttgaggtcaggagtttgagaccatcctgggcaacatggcgaaaccctgtctctactaaaaatacaaaaattagctgggtgtggtggcaggcagctgtaatcccagcaggagaatcgcttgaacccagaaggtggaggtcgcagtgagcagtgagtcaagatcgtgccactgcactccagcctgggtgacagagtgagactctcaaaaaaaaaaaaaagaaaaagaaagaaaaaaaggagggtttccggtccacagatgagaaatgaaaatatatatgtatacatatatatagtatatatacatattatatatgtattattatacattatgcatatattatatataacatgcatagacatatttttatattacatagtatataataaatgtaattatataattagatacattaaattatttagttatatataatatatacatgttatatgtactatatatttacataataagtaaggtatataatatatgtgtatattatatataaaacatatatatatatatattttttttgagacagggtctccctctatcacccaggctggagtgcagttgtgtcccatcatagctcactgcagcttcgaccttctgggctcaagtgctcctcccacctcagcctcctgagtagctgggactacaggcatgcgccaccacacctggctgatttttgttttcagtaaagatggggtcttgctatattgcccaggctggtctcaaactcctgggctcaagcaagcagtcctcccagctcagtctcccaaagtgttgggattacaggcatgagccaaggtgtctggcctgaaaatttatatatatatatataatatatatattatatatatgttatatatatatataatatatatattatatatatgttacatatatatataatatatatattatatatatgttatatatatatataatatatatattatatatataatatatatataatatatatatgttatatatataatatatatgttgtatataatatatacatatataaatttatgaaaatgttatatatatgtatatgtgttatatataatatattcatatataaatttatagaaaggaggaggagattggagaggaggagaaagaggtaaagggggaagagggagaggagggagaaaggaggagggagaaaggaaaggaagaggggaggagaagggagaaaggaagaggggaggagaagggagaaaggaggagggaaggaggaggaagaaaggaggggaggaggagaggaaagaggaggggaggaggagggagaaaggaggaggaggagaggaggaaggagaaaggaggaggaaagaggaggagggagaaaggaggaggggagacagaggaggaagaggtgaacggggaggagggagaagtgtgagaaaaaaggaggagaaaggaggaggggagaaaggaggaagaggaagtagccccagcaacgtgggtaactagtttccacggcgtttcctcacctgcggggcacatgctctcttacctccatggggttgatgagggtctgggagatggccacagccagggagccagcaaggagacgctcctggaagggcggggacccttgtattccacagaagtaattcttgcactgggagaggagagaggagggtgagagagaagtcagccaccctccgacacaaaacccgcgcagggaagaggcctggggtctggagggtgagtgtgtgcttgaacaagggcctggagttttgggggcatgggaggggtttgggcttgagctgggggaagcaggcccctcattccccacctgctcgaatacggagaacttgatggcatactcaggagcaatcttgagcacgttgatgccgttgccccgccacagggagcggaagccgccctcctggaccatgctctgtagcccccccagcaggttggtgaagttcgtcttggaggagtagacctgggtggagggaggaccctggaggagcccctgctcgcctctgtctccgtccccatccctgccccaagcgcagccccaccgggacctcccaagccacccaaccccaacccatccccatcccatccccattccttcttcagctccttccccggccagttctagaatcgcatgcaaccctgacccaaagccaacatcaacctacattcccacctcacccctcctcttcatctcctcagtctttttctctctctctttcttccttccatcctttcctttctttctccctttttgttccctccctccctcccttcctccgttcctcccttccttctttttttttttttttgacggagtctcactctgtcgcccaggctggagtgcggtcgggggatctcggctcactgcaacctccgcctcccaggttcaggcgattctcctgcctcagcctcccgagtagctgggattacaggctagtgtcaccacgcctggcttatttttgtatttttagtagagctgggggtttgccatgttggccaggctggtctggaactcctgacctcaggtgatctgcccaccttggccccccaaattgctgggattacaggcatcagccaccgcgcctggccttcttttccttttctttcttgtttttttgtttgtttatgttttcgagacaggatcttgttctgttgcccaggccggaatgcagtggtgcaatcacagctcactgcagccccaaactcctgggctcaagtgatcctcccacctcagccttccaagtagctgggactacaggtgcgtgctaccatggcaggctaattttgtaaaattttttgtatagatggggtcttactatgttgcccaggctggtctcaaactcttgggctcaagcgatcttcccactttggcctcccaaagtgctgggattacaggtgtgagtcaccatgcccgactcctttttaaatttttaattaattaattaattaattattattttgtagagatgtggtctgactatattgcccagctggtctcaaactcctaagctcaagtaatcctccctccttggcctcccaaagtgagccactgcacccgtttattttttcagccagggatctcgctctgtcacccaggctggagtttgtggcatgatcatggctcactgcagcctccaactcctgggctcaagcaatcctcctgcctcagcctcctgagcagctgagactatgggtgtgagatatcctgcttgaggtagctccagttctatgttgccttttttttttttctttcttttttgagacagagtctcactctgttgcccaggctggagtgcagtgatgcaatctcggctcactgcaacctccatctcctgggttcaagcaattctcctgcctcagcctcctatgtagctgggactacaggcacgcaccaccatgcccgactaatttttttgtatttttagtagagacagggtttcgccatgttggccaggctggtctcaaactcctgaccccagatgatctacctcccctgggcctcccaaagtgctggcattagaggcatgagccactgcacctggcccctaccttgtctttaaactcgtccaaagaccccatccccaattccctgacctccaacccccaccttggcccagcgttggtccctgtccctggcaagttctctcaactcctcaaactcgactccaagccatgtccacaccagctctatcaccatccacaacctcaatctcagctagtccaggagagcccaactccagccagcactcctatcctgaactccatccacgtcaactccatctgtcctcaccccacgttctccccagtggctccagcgctgggtcccgtcctccccccaacccacacaaacctgcatgtacaccttggctctgtccagaggtgccgtgcccgtgcgagacaccgccccggccatagctcctgagagtagaaacttccacaaggcctccttgttatccacttccaggacttccacggggaccatcagctgctctcctgtgtccagtacctgcagggcagacccggccctccctcatcctcagccaggttggggcaccttccccagacacacatctagggcacccacctggtgaaagacccaccctgttcccccaagtctgcatttttttttttcgagacggagtcttgctctgctgcccaggttagagtgcagtggcacaatctcagctcgttgcaacctccacctcccaggttcaagcagttcctgccgcagcctcctgagtagctgggattataggcatgcaccacaacacctaatttttttttttttttttttttttttttttagtagagatgggtttcactatgttggccaggctggtctctaactcctgacctcaagtgattcaaccctcccccctggtttttttttgttttgtttttgtttttttttagacagagtctcactctatcgcccaagctggagtacagtggtgcgatcttggctcactgcaaccgctgtccccctggttcaagcgattctcgtgtctcagcttcccaagtagggacaatggtgtgatctcggctcactgcaacctccgcctcctgggttcaagtgattctcttgcctcagcctccccagtagctgggattacagtgccaacgtgccgagcaaatttttgtattattttaatagaggcagggtttcaccatgttggccaggctggtcttgaactcctgacctcaggtgatccacctgcctcagcctcccaaagtgctgggattacaggtgtgagccaccacacccagccaatgtaatatagactctctaagttactcatggaggatccaaggaggaatacaaatgtaattaggactatatctagactcttaatttattcttattttttgagacagaatctcgctgtgttgctctggcttgagtgcagtgatgagatctgggctcactgcaacctctacctcctgagttcaagcgattctcctgcctcagcctcctgagtagctggtactacaggcgccaaccaccatgcctggctaagttttgtaattttagtagagatagggtttcggcatgttggccaggttggtcttgaactcctgtcctcaagtgacccatccacctcaacctcccaaagtgctgggattacatgtgtggagccatcgcgccctgcctccctgccccaccctgcttcaaggtggaattctaggtccgctagcaggggagtgggcctgtagagggcgtgggtagcctggcctctccctgtagtcctgaccagaggtgccgggacactggtgtttcctaaactcacctgctgtgacgggagatgttcaaggttgttgtcatgcatgtggccaaacgcgtacccatacacgtgtgtacagccagggttccaggatgggggtggaggcggaggttgggggggaggcggggctttgatgagtaaggtcttgaccctcctaaacagtgtctggatcctagagcaagtgttctgaggttccccaggctgagcgcccatggaggaagttaggacacctggcttcaaatccctaagcagttgtttgctgctccagctaccatgcgggagtgtctagtgggaggattgtgtgggggaccaagaggaggatgaagtcacaaacgcccctgtgaccttcctaggtgtggtgggcagcgtgatggcccccttcccccaagtatccacctcctgatcccccaaaccaataaatatgttatcgttataaattgaattgtgtcctgtcaaaattattattattatcgttttttttgagacggagtctcgctcagtctcccaggctggagtgcagtggcgctatcttggctcactgcaagctccgcctctggggttcacaccattctcctgcctcagcctcccgagtagctgggactacaggcatccgccac[184 bp omitted]ggaatttggagacagggcctttgggaggtcctcagggttagatgaactcatgaggatggcccctgcaagatggaattagttccctataaggaaaagacaaaccagagctctttctctctctctgtctgccatgggaggacgcagcaagaaggcatggcaggaagaaatccctcagcaggaactgagctagccagccaccttaaccttggatttcccagcctccagaaataaatgtctgcagtttaagaccccgctctttagtgtttccttatagcagcctgggctgacttacatttgttacatggcaaagggg[134 bp omitted]tgaaacccagtctctcctaaaaatacaaaaattagccaggtttggtggtgtgcccctgtaatctcagctactctggaggctgagacaggagaattgcttgaacccaggagacagaggttgcagtgggccgagattgagccattgcactgcagcctgggcaacagagcgagactccatctcaaacaaacaacaacaacaacaaaactttgctaggctgggcgccgtggctcattcctataatagcagcactttgggaggtcaaggcaggtggatcacttgagcccaggagttcaagaccaccctgggcaacatggccagacccctgtctctataaaaaatacaaaaattagctgggcatggtggtccatgcctgtggtcccagctacacaggaggctgaggtgggagggttgcttgagcttgggaggtggaggctgcagtgagctgagatcttgccactgaactccagcctgggtgacagagcgagaccctgtctcaaaaaaaaaaaaaagaaaaaaaaaaaaagaattaaggttgctaaacagctgatgggaaatggtctcactctgtcacccaggctggagtatagtggcacacttaaggtcaatccccttgacctctctgttcaggtggttctcccacttcagccacccgagtggctaggaacacaggtgcggacaccacgcccggctaagttttaaaaattatttttggctgggcgtggtggctcacacctgtaattctagcactttgggaggccaaggcaggtggatcacctgaggtcaggagtttgagaccagcctggccaacatgataaaaccccgtgtctactaaaaataacgaaaattagctgggtgtggtggtgcatacctgtaatcccagctactcaggaggctgaggcgggaggatcacttgagtccaggagttcaagaccagcctgggcagcaaagcaagaaatttttctacaaaaattttttaaaattagccaggtgtggtcatgtgcacctgtagtcccagctacttgggaggctgaagggggaggctcccttgagcacaggaattagaggctgcagtgagctatgattgtgccactgcactccagcctgggtgacagagtaagacccagtctctaaaaaacaaaaaaagtagtcaggcatggtggtgtgtgcctgtggtcccagctactccggaggctgagatgggagcatcacctgagcctgggagtttgaagctgcagtgagccatgattgcacccctgcattccagcctggggaggggacagagtgaaaccctgtttcaaaaaccaaaaccgaaaccaaacaaacaaacaaacaaaaaacctgacaaaatcatatacatgtaggtatatatgtattagccagctgttgccatgtgacgaattacccccccgccaaaggttggcagcttaacacaacaaacatttatcatctcacccatattctgagcattaggaactcaggagccgctgagccggctgttcccgtgatcagtgtttgaagtataagagtctaagattcaggattcaggtactgggatccagttgtttcggtggagggatccacaaagcttggactatccagggaattcaactgatagaattgcagtgagatgttggccaggacagcaagatcctcttccaagctcagttacatggctattggctgagttccttaccacatggtcctctccataaggctgctcatggcatgaccaccggcttcctccagagcaaatgttatgagaaagggggagagagagagagagagcatgtaaccaataaccaggatggcagcgacagtgtctttttttttttttctttgagacatagttttgctcttgttgcccaggctggagtgcagtggcacaatctcgactcactgcaacctctgccacccaggttcaagcaattctcctgcctcagcctcctgagtagctgggattataggtgcccgccaccacgtccggctaatttttgtacttctagtagagacggggttgccatgttggccaggctggtctcgaactcctgacctcaggtgattcacccgcctcggcctcccaaaatgctaggattatagacgtgagccactgcacccaatcttttatttttttattttttgagatggagtcttgctctgttacccaggctggagtgcaatggaccaatcttggctcactgcaacctccacctcctgggttcaagtgattgtcctgcctc[134 bp omitted]tgagctcaagtcatcctcccatctcagcctcctgagcagctggaactacaggtatatgccatcatgcccagctaattgaaaaattttttgtagaaatggggtctcactgtgttgcccaggctggtctcaaactcctggcctcaagcgatcctcccaccccgacctcccaaagtgctgggtttacagatatgagctaccccacccaccctgaattttctattttttccacaataaatttgaattactcattgtgggttgaactttgtcccccaaaaagatgtgttcaagccctaaccccagtaacctgcaaatgtgaccttatttggaaatacggtctttgtagatataatcaaattaaaatgaggttacactggattggggggggttgccctaatccgatgactgctgtccttacaagacatggaatcggccaggcgcagtggctcacgcctgtaatcccaacactttgggaggc[135 bp omitted]gaggcaggagaatggcatgaacccaggaggcggagcttgcagtgagccaagatcgcgccagtgcactccagcctaggcgacagagcaagactccatctcagaaaaaaaaaaaggccgggcgcggtggctcatgcctataatcccagcactttgggaggcatcctggctaacatggtgaaaccccatctctactaaaaatacaaaaaaaaaaaaaaattagctggctgtggtggcgggtgcctgtagtcccagctacttgggaggctgaggcaagagaatggcatgaacccgggaggcggagcttgcagtgagccga[131 bp omitted]aatgcaaaaattagccagttgtggtggtgtgcacctgtaatcccagctattctggaggctgaggcaggaggatcacttgaacccgggaagcggaggttgcagtgagctgagatcacgtcattgcactccagcctgggaaacagagcgaaactgcatctgaaaaaaaggatggaaatttgggcagagagacacagacacacataagggagcatacagtatgaagataggcaggcagtggagtgatgagtctatcataaaccaaggaacaccaaggaccatgtggctcacacctgtaatcccagcacgttgggaggctgaaggctggcgaattccttgaccccacgagttcgagatgagcctgggcaacatgatgaaatcctatttccacaaaaaagaagtaataataattaggccaggcacggtggctcacacctgtaatcccagcactttgggaggctgaggtaggcaaatcacctgaggtcaggagttcgagaccagcctggccaacacgggaatacctggtctctactaaaaatacaaaaattagccgggtgtggtggtgcgcacctgtaataccagctactctggaggctgaggcaggagaatcgcttgaacctggaaggcagaggttgcagtgatctgaaatcgagccactgtactccagcctgggaaacaagagcaagactcctatatcaaaaaaaacaaaaacaaaaaaccaaccaaccaaacaagaaattagccaggcatggtggcatatgcctgtggttctagctgctcgggaggctgaggtgggagaattgcttgaacctgggaggcagaggtggcagtgagccgagatcgtgtcactgcactacagcctgggcgacagagcgagactgcatcacaaacaaacaagcaagcacagaaacaaacaaaaagttgggcatggtggtggttgcctatagtcctagctacttgggaggctgaggtgggaggatcacttgagcccaggaggtgtaagctgcagtgagccgagatcgcaccactgcactccagcctgggtgacagagcgagaccctgtctcaaaaataaattagctggacataacggtgcgtgtgcctgcggtccctgtggtcccagatactcaggaggctgtggtgggaggatcgcttgagcacaggaattcgaggctgcagtcaggtacgattgtaccactaccctctaacctgggctgcagagtgagatcctatctctctctctctctcacacacacacacacacacacacacacacacacacagacacacaaattgttttaagccattctgtttgtgataatttggtctggcagccctaggaaaaggataatttgaaaaaaaattgaaatttgtaatttgaaaaaaaatacagaggccgggcgtggtggctcacgcctgtaatcccagcattttgggaggctgaggcaggtggatcacttgaggtcaggagttcgagaccagcctggccaacatggtaaaaccctgtctctcctaaaaatacaaaaaattagccgggcgtggtggtgggtgcctgtaatcccagctactcaggaggctgaggtaggagaatcgcttgaacccgggaggcagaggttgcagtgagctgagaccgtgccactgccctccagcctgggcaacagagtgagactccatctcaaaaataaataaataaataaaaataataaagcccagaaaatttagaaggggttataaacagggactccctcccctgctcccattttatagatgtgtaaactgaggctcaaagagggaatcatttcctggctcttggaactgtgggtgttgggaagcagccccttgtcccttccctaggggtagactaaggtggtcccatagccacccacccccttttcagtaaaaaccacaataaaagagcttagaaaatttattccttttgttcttttcctttgaaataacacacacaggcagggaggtggggcgcagtggaggtcgaaggaggtggaagcgtgcggaagtcctccagcccctccccaaatcccagttcccctttccaagtccctccatggggtctccagatgatcctaagctcagaatccaactatgaagtgcagaatgtaagggcgcaggggaggaggactttgctcctctctctggtagaaaaatagatctggaatgaatttggggatttggtggtttttttttgtttttgttttttgcatcattgggtgcttgggtttagggaagggtggtctttgccgattttctcctggctttcaactctggaagcctggggaggccctgatagtgctggggtggggacatcccttcatgtgtccctggcctcagactgtctccttgccagcctccaggagtgagtgattcctcggaccccttggaggaacacagctctggggactattcgcctagaaggtgggagggggatggaagatgctgtgaagtgtggggatgcagggagtggagtggttccagggaacagtttccccacagggctgggagggggtggccatgcagaggtggggtgagggggaatccagcatccgtgcaggttgcagccaggacctgggcttccttccccacagactccctcgaccatgcaatttcatgtcatgagaagccggctctgggcaccagtgtgtgtgggatactctgtgactgggctgccaggatctagacttggggcctgaacatttgggacccggcgcctggaagattcagatcagaaaccggggattcagggcttgggattcagtgccttggaatatcaggatctgccttcaagagatgaggtttcaacattgagggactgggcagagggattggggacccagaatctggaatccagcagctgcagttgccaggatccacttgctgtgccactggggcccccgcacttgttttaggagccagaatctggtgggtgaaggcttgggaatctgggatccagtgcctgggggtggaaggcgtagtgcttgaaatgcagggatctggcagtcagcagaaggatctgagacccagtgtcgaggttaaaaaaaaacaaaaaaccaaaaaccaatgcaggaatccagtgggtggagtgaggggatctgggatccagtgatgggggccccaggatccaggcattgtggttgtcaggatccagtggtgaggtttgttgacatccagaatccagcagctgagcttggagatccagggctcgaggcatggggatctggggttggggatctaggatccagcgtttcactaggacactggatctggtgcctgagggaggcagggtctgggtgttgaggtacagggaatccgtgctcctgtggttggggtgttgggatccattcactgatttgtgtgggatccagtggttaagacgtagaggtccaggatccagtagggggcacagggaagcgtgggatccaccttaggatgtggggctgcaggatccagtgatttgggggatggggattaagggctggggtgtggataatcttgaatcttgtggttagggtagcagacttgagttgctgaagtaagggatccacagttatggttacagggggatctgggatctagtggctgaagggtggggatcgcatgacccagtggttggggcataggagtctaggatccaggatctggatgctgggatcccatgacccaatggttggggcataggagtctaggatccaggatctgggtactgggatctcgtggccaaagagtagggatcctgtggttggatcatcagtctccagtggctgaggtgtggggggtgagggattggggggacgggctccgggtccctcacctggacgtgacccccaaggcctgcttcatgttctcgtagaccacataggagatgctcacagctggaataaccttcatgaagttgggggcgatcccccggtagaggccccgcatgccctcctgggacaggatgtgacgtagcagacccagcatggacagctgggggccaccctcgatggaggctgggagggggcggggggggcaccaggtaaggccaacgttcccctttcacttccccctcctacccccagggttgggccaggtggtgtcattgcagcaggagggaaggaggttagactaacagtgggacctaccactcagagtcgagacttgtattgaccttggaactggctgctcaccttttcgccccaagtttggggacaattagaaatggagcaggtatgggtgtgcaaggtgagaaaggacagaaatgtcctcctcctggagccaggttccctccctcctttcccagctgactcctactcatattcccaacccctatcccagagccagctccccaggggactcctccttggtgctccagtctaagtcaggctcctccctgccctccacccactttttgttttttagacggagtttcgctcttgttgcccaggctggagtgcaatggtgcaatctcggctcactgcaacctccgcctcccgggttcaagcaattctcctgcctcagcctgccaagtagccgggattacaggcatgcgccaccttgcccggctaatttttttgtatttatagtagagacggggtt[221 bp omitted]tcactcctgttgcccaggctggagtgcgatggcacgaacttggcttactgcaacctatgcctgctgggttcaagtgattctcctgcctcagcctctcgagtagctaagattacaggcgcctgctatcacacccggctaatttttgtattttcagtagagacaggatttagccatgttggtcaggctagtctcgaactcctgacctcaggtgatccacccacctaggcctcccaaggtgctgggatggcaggcgtgagccactacccctggctcccacccacttttttgagacagggtctcactctgtcacccaggctggagtgtggtggcataatcatagctcactgcagcctcaagtgatcctccggcctcagcctcccaagtagtttggactacaggcacctgccaccacgcctggctaatttatttcttcattttttaaaaaaagatggggtcttgctatgttgcccgggctggtctcaaactcctggactcaaatgatccttcctctttggcctcctaaagtgctgggattacagatgtgagccactgtgcccggcctccttctcccctttatacaaccctaaatcaatacttaattccagaatgatttatttagcatcttccttcctctccggcctgtgagctctatgagggtggggaccgtgtccgtcttgtacactgacacatctccagtgaaaatcacaaaacacaaacactaaaattctcaagaaaattctcaaaacagattcagggagaatgggagggtagtggtggaggggacggggggaaataattcataaaagaaaaatacagacaaaaacaataaccactctggccctgactgctccctacccctgttcctagcctcccgctcacgataacccaggcttacaaattaagagttcaagttaccagcctggaaatgctagacatttgccagcaacgacatcccagctaagtctgcaagggatctcttcctgtacccactgcacctgttatcctagttaatcctcagctccatgaaagtaaaggactcccatttcaatgtcacaaatggggaaacggaggcccagagaagcccatcgaaatccaggagggtcccagcccagggctctacttgggagaagctggggcccaagcgatgagactccccctgccccatcctcccgcccaggcctcaccttgtgcctgcatgcgggtccggaccagggccagcgggtaactggctatctggccgcaggtgctggatatggtaccgcaggccaggagcacgaggatgcctgggtctgccgagtcgtggctgtactgctgaagccaccagttcttcagagtctggagtggagaagggagtagggagggttggggtgggtgaccctaggaccctggcttcaaaggcctgctggccggttctgtatcccatgacaggtgctactagctgagcacttggtacctcctaggggccgggccagccctttccctgcgtcccctcacccagtcctcatctggaccctctctggtaggtggaataagggtcccctgtactgactatgccctaatctctggaacctctgcatatgttacccaagatgacacaaaggactttgcagatgggattcagttaaggatcttgagatgagattattttggattatctgagtggcccaatgccatcacaagggtccttctttttttaaaaattattattattattattttgagatgaagtcttgctctgttgcccaggctggagtgcagtggtgtgatcttggctcactgcaatctccacctccctggttcaagcgattctcttgcctcagcctcccgggtagctgggaatacaggtgcgtgccaccacacctggctaattttttgtatttttagtagagacagggtttcaccgtgctggccaggatggtctcaatctcctgaccttgtgatccgcctgcctcagcctctcaaagtgctgggattacaggaatgagccacagtacctggcctaattatttttctttttacagagatggagtgtca[132 bp omitted]gagtttcgttctcgttgcccaggcaggagtgcaatggtgcaatctcggctgactgcaacctccgcctcctggcttcaagcgattctcctgcctcagcctcgaagtagctaggattacaagcgtgtgccatcacgcccagctaatttttgtattattagtagagatggggtttcaccatgttggccagagtggtctcaaactcctgacttcaggtgatccacctgcctcggtctcccaaagtgctgggattacaagcatgagtcaccatgcccggcacaagggcccttctaagagttagaaaagtaggtgtaaagacagaagcagaagcgagagagagattggaagatgctatgctactggctttgaagatggaagaagggaccacaagccaaggagtgcaggcggcctctagaagctttttcaaggcaacgaaacagatttcctcctggagcatccagaaggaacgcagccctgccaacatctcgattttataaagcccagtaagaaccccattttggatttctgacctccagaactgtaaggatatacattcgtgttgttctaagacactaagtttataacttgtttgcttgcaagaaggg[138 bp omitted]aagactctgtctctacaaaaacaaacaaacacacaaacaaacaaacaaacaaaaaaaaactggatgtgatggtgcatgcctgtggtcccagctactcaagaggctgaagtgggaggattgcttgaacccaggaattcaaggctgtagtgagccgtgatgcactccagcctgggcgacaagagtgagactcagtatcaaaaagaaaaaaggtcgggcctggcgtcctcacactggtaatcccagtgctttgggaggctgagatgggtggatcacttgaggtcaggagttcgagaccagcctggccaatatggcgaaactccatctctactaaaaataccaaaattagccggtgtggtggcaggcacctgtaatcccagctactcaggaagctgaggcaggagaatcgcctgaaccggggaggcggaggttgcagcgaggcaagatcacaccactgcactccagcctgggcaataagagcaagactgtctcaaaaacaaacaaatgaacaaaaaaacactctccaacgacactgcctgtggtagatgctgtgagtacaccaccttcatcccttcccactccaattcagacctgctgacttcttactgccaacatttacccaaagactttgcttgtggactttctctgaacgcaggccagccggctctgaccacttaggaatgggcagaaagccctgggaaattagcatctccagatgcaaccttcaaaagactgacctggtggatcaataccccagctccctcatctctctggtgcagcatgtcttatgctgcctcccacagatctctagagggctggaactccatttgctaggaatagtaacttgcttgataacatactgttacgggttgaatcatgtccctcctttgggggggaacatgttgatgtcctaacccccagtatcttagaaggtgacattctttggaaatagggtctttgcagatctaattagttaagatgagtagggtaacagggtagacccttagtccagtatgactggtgtccgtagaggagaaagacagagacacacacggagaaagacagccaggtgacagcggaggcagagatttgagtgaatgtatctacaagccaaagaatgtccagggttgctgggaacaagcagaaactgaaagaaggaaggaaggaaggattctcccctaacaagtttgagagggagtatggctctgctgacaccttgattttgcacttctggcctctggaactgtgagacaataactttctgttgttttaagccaaccagtttgtgatactttgttacagcagtcctaggaaactaacatactcatactgtgtgcattgactccctgtctcattacctccccaataaatcacttgtcctcacgtcccagtttcagggtctgttttggaaggatctcaaactaagaccaaaactattattattattattgagacagggtctcgctctcacacccaggctggagtgcagtggtgaaatctcggctcactgcaacctccgcctcctgggctcaggtgatcctccctacttcaacctctggagtagccaggattacagctgtgcaccaccacacccggctaattatctttatttttattttattattattttttgagacacagtctcaccctgtcgcctgggttggagtgcaatggcaccatctcggctcactgcaaccccacctcccaggttcaagtgattctcctgcatcagcctcctgtgtagctgggattacaggcttatgccaccgggattacaggcatgtgccaccaggcttggctaattttttgctttttttttgagacggagtctcgttctgtcgcccaggctggagtgcagcggcacaatctcagctcactgcaacctccacctcccgggttcaagaaattctcctgtcttagcctcccaggtagctgggattgcaggcacacacaatcacacccggctgatttttgtatttttagtaaagacagggtttaaccatgttggccaggctggtctccaactcctgacctcaagtgatctgcctgcctctccctcccaaagtgctgggattacaggagtgagccaccatgcccggccctattatctctattttatagaaaagaaactgaggctcgggaagttacttgcccaaagctacaaaataaaggtgagaaccaacattcacagctgtatgtgaatctagaactgtgcacctgaagactttagggtggctaatcccttctgaagccttctgccaaggtgactgtaagaacaagaccttctttgctttgcggctgggagaggcttataggtttcatttcctatgccaattctaatccaccagaaattgctgcctgaaactggaattgtgttgagcaggactcagtgctgtgatggattagtaatgcctagcccaggcacagactgggtaaaataggcaagtacttaacattattgcctttgaaattttagaagccttcttttgggtctagaacagcacttgccaaatagatgtttaatgggttattattaagatcaatctgttgaaaagaagttctaaagacggccgggtgtggtggctcatgcctgtaatcccagcatttttttttttttttgagatgaaatctcgctctctcacccagggtggagggcagtggcgcgatcttggctcacagcaaactccgcctcctgggttcaagcgattctcctgtctcagcctcccgagtagctgggattacaggtgcccaccaccacgcccagctattttttgtatttttagtagaaatggggtttcaccatgttggccaggatggtcttgatctcttgatcttgtgatccacccccctcagcctcccaaagtgctgggattacaggtgtgagccactgcacctggcaattccagcattttgggaggccgag[132 bp omitted]gaggcaggagaattgcttgaatctgggaggcagaggttggagtgagctgagatcacaccactgcactccagcctgggtgacagagtgagactctgtctcaaaaaaaaagaaaaaaaaaagttctaaagactagattaatgtggccagcactgggttaaaaacaaaaaaagttaaatcactttactgagagacttctcggagcctttaagggacaaacacagattttgaaactccaaggtttctaaaacctcttagacttttaaagtccctttttgggtaaagaatgcattaaataataagactgtgtcttctttctgtctttctttctttctttttttttttttttgagacaggatcttgctctgttgctgaagctggagtgcattggcatgatcacagctcactgaaacctctgcgtactgggctcaagcaattctcccatctcagcctcctgagtagctggcactacaggtgtgcaccaccacacctggctattttttttttttttgagacagagtcttgctctgtcacccaggctggagtgcagtggcacgatctcagctcactgcaagctccgcttcccaggttcatgccattctcctgcctcagcctcccaagcagctgggattacaggtgcccgccaccatgcctggctaattttttgtatttttagta[264 bp omitted]ttttttttttttttttgagatggagtttcactctgtcacctgtgcagtgcaagaactcggctcactgcaacccccatgccccgccctgggttcaagcgattctcctacctcagactcctgagtagctgggattataggtgcccaccaccacgctcggctaatttttgtatttttagcagagctggggtttcaccatgttggccaggctggtcttgaactcctgacctcaggtgatccaccggcctcggcttcccaacgtgctgggattataggtgtgagccaccgtgaccggcctctactcatacctcttaatggcttcctattttacttagaagaccctgtaccctgccctgatcagtcccccccagacacctaagacttccactcctccaaaaggccgtatttgttcctgcttccagacctgggtactagatttgtgcatgctcccttgtgataatacgcccaacccatggcttcaatgtcaccttcttggaggcgttcctcaacccccctcccgcccactgttactgaagatgacaaatcctgtcttgtgatcttctgagagcttttctaggagctgaaactatcttatttgctggttgattgcctgccttgtttatgggaatgggcattccaggatggcagggaccatgctggtctcattcaacaccacaactgccacaatccgcacagtgtctagcacagagtagatggtcagtaaatagtcactaagcgaatgagtgaacaacaaaatggaggaacaaatgaatgagtgagcaacggtcttgtctcatttggttgtctacatgccaggtgctggggagggcaggtaaagatggcaggaacagagcctattagatcagaatcagctacataatttgcaggatccagtgcacaatgtaaaagggtgggggtcccttgttcaaaaattattggccaggtgtggtggctcacacctgtcatcctagcactttgggaggctgaggtggggggatcccctaaggtcaggagtttgagaccagcctgggcaacatggtgaaaccctgtctactaaacatacaaaaattagccaggcgtggtggcaggcacctgtaatctcagctactcgggaggctgaggcaggagaattccttgaacctgggaggtggaggctgcagtgggccgagatcgcgccactgcattccagcctgggcgacagagtgagactctgtctcgggaaaaaaaaaaaaaaattaagaatttcaggcctggcatggtagttcacacctgtaatccagcactttgggaggccaaggcgggtggatcacttaaggtcaggagtttgagaccagcctggccaacatggtgaaaccctgtctctactaaaaatataaaaattagccgggcatggtgatgcatgcctgtaatcccagctactcgggagactgaggcaggagaattgcttgaacccaggagatgtaggttgcagtgagccgagatcgcgccattgcactccagcctgggcgacaagagcgagactccgtctcaaaaaaataaataaataaataaaaataatttcgagacagcagtagcagagcgttacaccaagcacagggcccttccgagcatggggctctctgcgacttcacaggtcacatgcccatgaagcaggccctgtcttgcatacaaagattttggggggaacgcttggggacatccaggaccatgctaattgggggagacctggtgatcccactagaaggtaaaagcaacagatgaggtccctggaagagaaacagccaagaactgtctgcacctgcctgtgttgataaaggtctcaagatgctggtgattaggtgtggttcttatggtaacagcagatgctcaaatgggcaggccctgaagatgacattggcttagagaccgtggctgggtctgatacttgcttcggggaagttgggtgtctttgagactcatctttgcctgccttttttttttttttttttgagaaggagtctcgctctgttgcccaggctgcagtgcagtagctctgtcaccaggctggagtgcagtagcgggatgttggctcactgcaacctccgcctcccaggctcaagcaattctcatgcctcggccttttggagtagctggtattacaagcacacatcaccatgcctggctaatttttgtaatctttgcctgatcttatgtttgtcagctagagtggtccctgactttcaggtgaccccggaaggctgagctgctaatcaaaagtaagtggagaagtgggagagtccaatacctggaagggttccccaggattcccagggccaaggtgctcctcacctcataactgcctttctctaactatagcaggtcaactgagccagccccaggggaaggggaaggggtgtcctgtgggtaaatcccagaggggagcagggaaagaggaacgcgctgcccacagacctcgtagacggccaggtcgatgcccgcataggggatgatgcccagcacgttggggaggtagccgcggtagaaggcacggggcccctccctctccaggatacgcctggcgcagtccagcagccccttatactggcccgtccggcgcaaggtcagccgcgtcttcagcacctggggagaacctggttatccctggaaaagctgtcccaccaaatcgctacatccaggaatgaagacacctagaaatagctactcctgaaaacagatgccctgagaacaaccgaattttaaaaaccacctactctagaatcttctgctatccccaaatccctatacctagaaatagttacacctaccaaagtgcacacatgtggcaccaccagtaactgtctcctgatatctttcttttattttttggtcatttctgtagagatggggactcgctactttgcccgtgctggtctcgaactcctgggctcaagtgatcctcccctctccatctcccaaaggactggggttacaggcatgagccatcatgcccagacctccagtatcttgttcccttctgctttcatatcagaaactgtaactttcagcaagcacacagccactagaaagaaaaatgacatttcccagatgccctgggtatgtggctatgtcactatgtcctagccaaagaaatagaaggaagagaaagaggtacacataaggttcagaaagcatccttagaggtggggaggtgtttccttttttattgcttcttccttcttggctggagtgtggaatgtgatgaacggagcacaagcagccacattggtccatgaggttgtgtaacaacaagatagacagaaagaacctgcatcgctaacactctgaagctaccatcccagcctgaaatgctcatctgtagactttgttgatgtgattgaagtttttttttttttttttttgagctggagtcttgctcagttgcccagactgagtgcagtgacatgatcttggctcactgcaaccaccgcctcccaggttcaagccattctcctgcctcagcttcctaagtgtctgggattacaggtgcccaccaccatccccagctaatttttgtatttttagtagagacggtatttc[134 bp omitted]atccaaacaatacacttcataacctgaaacctgaaataatttatctgaaaacatgtagctagcacagtctatccttagaagaggcatattcataaacagttggtgacacctagacacgacgtccctgggaacgtgcaccctatccttagaagatgcatatttataaacagctggctcctatgactaccatccaaacaaggataaccgacactaccttccccagaaattatatctcagttgtaatacccagacaggctacacatgaaattgcattactctgatgagctatactccaaatcagagagggacaaaggtaaaatcccaatggatattgtgaaatgcagagtgagatgggtacagcaggccccccaccctgccatggggcctccgctggggtccctccttctcacctccatagggtaaatgatggtttgggctgtggcaccagccagggagccagccacgaagcgctcctgcacatgcagtgtctcctgctgccccaggatggccctcttgatctgaggcggggagacacagggatgggtaggaccatgggggttgaaccttccttgcactccactgttctcctggcttccaaagaactggcttgctgcaggcattcatgcagaggagcagatgcctgatcctggggacctgtgttcaccacccacccccaagccaatcccgtaaatctttatgtacagcccagtcttccctatggcaagcacattcctccctgtacctgccctcacctgttcataggccatgaacttgatagctgactcgggggcaatcttgagtacattaataccattgccgcgccacagggagcggatgcctccctcaaggaccatgcttcgaagccccccaaggatgttcagccggttggtctttgaggcatggacctgaatggggagacaacagcttggaggtcccctcccaggtgtcaggcctgggggagggggcaggtctctccagagcccctcacctgcatgaagaccttgaggcggtccagaggggccgtgcctgtccgtgacacggcacctgccactgcgccggccaccagctgtttccaccacatgcccgtcagcttctcttgctttgagaactcgtccggcactgtcaggcactcgccaatgtccaggacctaaagatacaggtgttgggggtgtcatgccatggtggggacagggagatgtgactcagtcctaaataggggagtctcctctatgaatcctaggataccctagagtctgccaatgactcttgcttggagaccccagaagagtcctgttgggtcctaccaggtgtcaccaaagcatctaacctagcagcctccttagaagatcccaatatcctactaaatcccaccaaaggatctgccaaatcccactaaaggatcctattcaagtatctgccacataaagatccctccaggctagatgtgatgcctcacatctgtagtcccagcactttgggaggcccaagtgggagaatcccttggggccaggagttcaagaccagcctgggcaacatagcaagatcccctctctacaaaaattggccgggcatgtgcctgtagtcccagctactcaggaggccaagatgggaggattgcttgagcccaggagtttgaggctacattgagctatgatcacaccactgcatttcagcctgggaaacagagtaagaccttgtctgtaacagcaaaaaaagatccctcagggcaaatgagattctactgaaggatcccactcaagggttttccatataatgattccaaaagatcccttcagggccatacaagatcttaccaggcacctcccctataaagaccccagcagatccttctcagggacccacgaaatctcacagggatctcctccacatggagtccccgtgcaggaatcatttccagtctagaatttctaaccaaggtccccatgaatcgtctggggtgggagtctctggatctccaaagaggttctcaccagatcccacagacggatccccctccagatgccatcagatcctaccagacacattgctcatagacatttcacccaggaactagggatctagagcaaacccccactaccctctctagtggctcccattggatcctctgaagaccgtgttttttttttttttttttttttttttttgagacggagtgtggctctgtcacccaggctagagtgcagtggcacgatctcggctcactgcaagctcccgcctcctgggttcacgccattctcctgccttagccttcctagtagctgggactacaggtgcctgccactacacctggctcatttttttaatatttttgtagagacggggtttcaccatgttagccaggatggtcgcgatcgcctgacctcgtgatccgcccacttcggcctcccaaagtgctgggattttaggtgtgagccactgcgcctggccaagaccgtggtttttgaacgattctgttcagccgtagaatcttttatccaggcagagaacccagcagaagagagctgtgtgggtggaaggtgggaggccttgtaccccatctggtgagctctttcttccctgtacccgcaacccccacacgctgtccccagaggccccgatgtaagtctcaagggctgcgcttcaatcagacagcagagatgtcccaaatgggacccttgaaccctaagtggaggaagagaggaacagaccctcatccgtcagctgctgccagtgccttctccttctggaaagtcctggtccagcccatccaagccctggggagatcggagcaaggcccccctggggaagagggcacagccttcagctggggaaagccacccccacctcaccgtggaatgcttccagaaatacagcacgtcctccacattttccagcgaatgcaacaggaagtggtcgcgccattcttgccagtcaatggtcattgtgccgtctcggtccatgctggggggaagaaagggggtggaggaggacaggttcagtgcctgggggtgggctaggctggggtgaagttctgctaggttttgcagtttgggaggttcaagtcctcatatcaaccctattagagatgtagcaaatattaccatcattttcttttttctttttttttgagacggagtcttgctctgttgcccaggctagagagcaatggtgcgatctcagctcactgcaacctctgcctcctgggttcaagagattctcctgcctcagcctcccatgtagctgggactacaggtgcacaccaccatgcccagcaaatttttgtatttttagtagagacagggtttcaccatattggccaggatggtctccatctcttgacctcgtgatccacctgcctcggccttccaaagtggcaggattgcaggcgtgagccaccatagccagctgtattaccctcattttgtagagggggaaacgggctaagagaggcaactggtcccagatctgtctggcttcaatttgaatttttctttctttttttttttttttttccagaaggagtctcactccgtcaccctggttagagtgtcctggcctgatcttggctcactgcaacctccacctcttgggtttaagggattcccgtgcctcagcctccccaagtagctggaattacaggcatgcaccaccacgcctggccaatgtttgtatttttagtagagatggggttttaccatgttggccaggctggtccccaactcctgacctcaggtgatccacctgcctcagcctcccaaagtgctggggttacagatgtgagccactgcgcctggccagatctgtctgacttcaaagccccaacctctcagctgtatcctccttgggactgggtctggagcccagaagacagagatggccaaggggtcactgtgtcctgagttactttggattccagacccccagcgactcacctgtgcaaaattttctcagcctgctccagcgagatggaaatgcccagagctcggaaactctgttggatctcagagacatcaatgtgacctggggagggggccggaggtggggaaggatgtgcgtgtgaggacacctggggaaccccaggaccaaggatcagaacagcttggaatggaggtggtctagcaagatcaggggctccagaaacctaggaggaggtttgcagtagggctgtggggggacccctgactcactggggtcagagaggtggaactgggaaatactgggggggcttctctgttctgtaaatgaatgaaggaatccaggggtaattgtaggggtctctatgccatgggggattgagaggcaatatccacaacccagatgctgctatgaggggatctctgtcccacaggggacccaggaacagcatagggtatctttgccccatagaaaaatctaagggtaattatcggggttctgccccagtagggaaaggaggtgggatgggctggctgggcctcgaaccacctagctagggggtgaggagtgctcctgaaatagcctatgagtcatcggggagaagcggccctccccctctcctcctagcgctgccagttctaaccccactgatgtctctagggcccccacagccctatcccttggggcctgcaggcaggtcgcccgaccttaccatcctggttccggtcaagactgtgaaacatgagcagcagacgctgttcccgctcctgcagatagcgggaaaattcctccaggtcgagcccgccatctgggtcagcatcaccctcagaggagataccctgacagagggaaaggggatagaggtggctccaggaacctgctcctgatctggaggggacgcatgtcaccttatgccttaggaacccagagcccccagcgccttgaggaaggggatagaagacgtcaccccacttctccctcagtcagctaacttctcagccagatccctacagccaccacaggtctgtgcggtgggtgtgagtggtctagttttcctggtgagcaaactgaggctctgcaaggtcaagtcaccagttcaaggtcacagaaccaggaaatggtaacctcagttctcatctgtaaagcctgtccttccagctgtctcttgtttttagtttttgttatttttttaggtatctcattcctgttgaacccagctgcctcttaaaaaaccctgtccacatgggggacccaggggttccctttggaggaagccctgggcgatgtggggcaggagagaaccaagcggagtggctgaggccttggtttttcccatttgggaagtgggaggttggactgctctcagggttgctgtggttctcttagagcgatctggggctacaggtgtgggaaggacctgcaaagtggaggtgggggcagcgggaggaaagtcttgttataggtgcattcccagctgcgggtgaccgcagacaggattgggtccctggctggggcagcccgggacagtgagccaggcccgtgaacggcccatgaaagggcaggccagggaatgtaaacacagggatcggggcagctgcaggccagggcagtaggtgcccagaggatggagggtgtgtctcctggaggtgagagcagggcacgtcatgggctgtgcagtctggaggagggtgtgtcccgggcagtgggcaggaaagcgcccccatctcttcccaggcagacgccccctgccccgcagcagggggatcgggtgttggccgcggaactgcaggcttggggcctcggcgtccctgtcttgagcgatcccgttaggccaaacacgagtgggtagggggaacgagacagagacacaggttctggagtccagccacaggtagtccctggtggctccggccgcccagttcaggggcttgggtaaccgggagcgggcggggccgggaggggaggaggtccctgggggtgggggtacctgttgggcgccggggtctgggttgcccccgcccagcctggccagcccctggcgcaactcgtgcacgtccacgcggccatccttgttactgtccagctcctcgaacaggcgaccccagcgctgccgccgctccgcgtcgcccgggctcccccgcatggcgcccgcccgggggggaggggaggcccggcagcggcggcctcagtgggggcttcgcggctccccctccccccccgggaccccgcagggtcagctcccgcggccgccggctccgcagcctccgcgcagtccgctcggctctggcacttgcgggaggtggtgacggctagccgtcgccgcccgcgccagaacttgcgtctcctcccccgacctgcattggggggaggggaccgagggcggagctgggggcgtggggagggaatgtctgggatggtctggtattgcacagccgaggaacaccagagttccttctgggaagacgggctagggagctcagtggtctcaggtctggtttcagagttccgcctctgcgtgcctcagtttaccctttccccctttgcccaagggggcaaggtagagcgctgtcggggattgggtttcataatccccttccacttgacctccccgccacacccactaatcttcaggaactcaagttctcgcttttcccagacgcacgcaagaaccgtgcaccatctcgctcgctctctgcccgcccgcgccttacaccttccccgctcggccgcagaaacagaagatccaggagcgatgctctcccactgtcccttcttcccgcccgcgcgcttcctttctcggttcccactctgactgggaaacagaaaatcaacgcgcggcgcggctgcaaagtcggtttcctattggtcagcgcctcctgggctgagcccgcccgccccgcctcttctcccacctaggcggggcctccccgcagacccccgactgcctccagcccgcagtcccaccgcctgccaggagatcttaaaggggccgcggccgcaatcagacgctgagcggcgtggggagggggtggctcagtgacccgggcgcggggttgaggatcccagtggtcgagcgctggaggcagggccccagcctgtcgcactcgctgcacctgcggaatgtccctactgctagtttcgggcgcagtttctcgatccaccattagggggaagggagcccagaccacttgacagcgaatactcgataacaaatctcactttgattcagtgctttgcacatgccagggcttttactcacctctcgagtcgtctttgccaaaaccctataaggtaggtggtactggcgttcgcactttgcagataaggaagcggaggttaagtcattctccccagtcctgatgaccactaaggggcaaaacagggtttaaagagatctgggatccttaaccatcactctataccctagaaagaattaattatcttttttttttttttttttttgaaacggagtttcgctgttgttgctcaggctggagtgcaatggcgcgatctcggctcactgcaacctccgcctcccggattcaaacgattcttttgcctcagcctcccgagtagctgggattacaggcgcccgccaccaaacccagctaatttttgtatttttagtggagacggggtttcaccatgttggccaggctggtctcgaactcctgacctcgtgatccgcccgcctcagcctcccaaagtgctgggattataggcgtgagccatcgcacgcagcagtgagttttttttttttttttttttttttttttttttttttttttttttttttgagatggagtttcgctcttattgcccaggctggagtgcaatggcacgatctcagctcaccacaacctccgcctcccgggttcaagcaatgctcccgcctc[211 bp omitted]acggggggggggggtttcacctg[132 bp omitted]aagggtcctcaggagggggtcttgttattatcatcatcctttatccaaagatacagcattggccggtctcggtggcttaggcctctaattctagcaatttgagaggccgagatgggaggatcgcttggggtcaggagtttgagaccggcctgggcaatatagcaagacacccaactctacaaataataataataattattattattttttttaaaaaggaaagaaaacaaagatacagtcgtgagggcatatttagttcacgcccagcctctgcctagacaggtgtgctggaacaggtgtgccccagacaaatgagtctcttctaagaggctccccagcagaggttttcatttacagttgttccttgcaggtgccatacagcatggagtgatacagaggtttttttccatgtaagtgcccctaaataggtgttttctcacagatacattcttgacaggtgggcctcagtgtatgtgagcccctgccctgatggttttacccacagatgtgtgtcaatgtgagtgtgccccgtgcagatgttccaagttcttcccctcacttgagctcaattccatacaggtgttcctcctacaaggtgctttctcttacctcacaggtatgtttctgagcaggtttccctccacccatgaatgcattctacagtctcccgccccgtaggtgtgtttcagttaagtatacacccatctgggtatgtttccatacaaccgagtcccatacaggtttacgtaaatgcaggtgtgtctcatacaggtatttacaagacactgacacccaggaattcccccaatgcaagtgccgtacatttcataggtgagccatgcagatatgttcctaaaacaggtctattccacatcagagtgccttagttagctgtttgtgatgataatgcaggcgtgttctatagagatactgtccaccctggtggtatgtatccatttggttatatttcttttctttttttgacagtcttgctctgtcacccaggctagagtgcagtggcgtgatctcggctcactgcaacctccgcctccagggttcaagcgattctcctgcctcagcctcccaagtagctaggattacaggcgcccaccactacgctagctaatttttgattattttttagtagagacggggatttcaccatcttggctaggctggtctcgaactcgtgacctcgtgatccacctgcctcggcctcccaaagtgctaggattacaggcgtgggccaccatgcccagccttggctatatttcgtatagctgtgattcaatgcagatttttttttttttttatgagatggagtttcactcttgtcacccagggtggagtgcaatggtgcaatctcggctcactgcaatctctgtctcctgagttcaagcaattctcctgcctcagcgccccccgagtagctgagattacaggcacctgccaccacacccggctaatttttgtatttttagtagagacaaggtttcaccatgttgggcaggctggtctggtttcgaactcctgacgtcaggtgatcctcctgcctaggcctcccaaagtactgggattacaggcgtgagccgccgcacccggccatctgttttctgtatgttcttatatgtgaacacctgtgcagttgtcttctgtacaggtttggttccacacaggtgtttaccatacagctgtttttttgtttttaaaatttttttagagacagggtctcactttgtcacccaggctggagtacagtggtacaatcatagctcactcactgttacctccactcctgggcccaatcgatcctcccacctcagcctcccaagtagctggggctacaggtgcgtgccatcacatctggctaattttcttattttttgtaaatatggggcctccgtctgtgggccaggctgatctcgaactcctggcctcaagtgattctcttacttcggcctttcaaagcgctgggattacaggatcacgccaccgcccccggcttattttcttctttttatttatttgtttatttatttatttattttttgtagagaatgaggcctcgctgtgttgcccaggctggtctcggactcctggcctcaagcaatcctcttgcctcggcctctcaaagtgttgggattacaggcgtgagccattgcgcctgggcaggtattttttctcattaagcgctccccatccaagtctgccctaggcaggagtgcctagtgcacgggtacatacataccccgtgcgtctccacacctgtgcgctcccacagatatgctcgcaatgcaggtgtaaggtccccctcacacctgcgcgcttccgcggtctccctccccgcatccccattaagggactggggtcccgttacaggtgcgcccacagcgcggccccgcccccttcttgactccgccctctcagcgaggctcaggtgcacaagccggaagtgcgctctcccaggtgagtgactaaactttccgggtcacgtgacagggcggagccggtggggtcggacccacagaacgaccgacggaccgagggttcgagggagggacacggaccaggaacctgagctaggtcaaagacgcccgggccaggtaggaaggcaggacgcaccgctaggcctgccccctcgcccgtccaccctgcccgtcccgtcccgtcccgtcccgtccccttcctttccccagcccaggaacgcgctcctgggagttaatctttaatcgctgacctctggcggctggggcggggcgggactcatgggtgccctggcgccagttgtctctcctgtgggcctgcgccggggtccccaccccgatcccaacgcctgggcctctccttctcctgtccccaggtgccccgtcgcaggtgcccctggccggagatgcggtaggaggggcgagcgcgagaagccccttcctcggcgctgccaacccgccacccagcccatggcgaaccccgggctggggctgcttctggcgctgggcctgccgttcctgctggcccgctggggccgagcctgggggcaaagtaggtaccagctgagagcgctgggggggaggggtctggattcctggatctctgctggggacgtggcttagaagcgctgggtatctggggcgcagagagggtcaagaattggggagcggggaagaaataccttggggaggggtctacagggttagggctcggggggattaagatttctagtttcttccttggacactgggagttggtctaggagacctgagttccccagcgaggtggaattgtgtgttggagtgggggctcctaagtaggacttggggggaggtaagggctgcgtacctgagtcttggtatagtgcaggtgtttttgggtgaactgggagctgggaggaggcctgccgagccgggtcgacctggttggctgaaggtgtagaccccagccattcagtcttagatttgttttgggagcctgtggggaggtgtgagtcagacactccagggaaaagctaggcccgcccagatccttaagggcccagggccgagaggtgagtaggggaggggtggacttctggacaccctactgggctctgcgggactgggtcgggggggtgtcctggggagcaaacacccaagggagaggtcttacctgcaagacacccaaccatctctgtgcgaatgaaaggcagagtttgaattgggacctgctagggggaggtgaaggggaatgcccaaagcaggtgcagatgggcggggatgggagagaaagatggagactgagttattctctgccttcaccctccacagtacagaccacttctgcaaatgagaatagcactgttttgccttcatccaccagctccagctccgatggcaacctggtgagttggaggtatatgtgggaagatggcagcaaggatgttatctaggggtcacacatatagcatgtagagaggactagacaccccctccccccagaggtggcaggtcagggtggctttggagagctctaagtaggagagacctgaagtcttagaccaagaagactaggacaccctggagggagtgggcaggaatactgtagctgtcagatgtgtgggctcaggaattccatatgcctctcaggtgggtgggggagcaaggagctcagacttggtagatgtgatgaaagcaggagtcccggccgggcgcggtggctcacgcctgtaatcctaacaccttgggaggccgaggcaggaaaatcatgaggtcaggagtttgaaaccagcacggccaacatggtgaaaccctgtctctactaaaaatacaaaaaattagccaggcggggtggcacacacctgtaatcccagctacttgggaggctgaggcagggggaattgcttgagcccagaaggcggaggttgcagtgagccgagattgtgacactgcactccagcctgggcaacagagcaagactcggtctcaaaaaaaaaagccggagtcccagacatggcaggtgcttgcgaggggtgtcccggacatggcaggtggtggggagccttcgcaccccagacaaggtaggtagggatccaggaagccccactgtggggatcagatcaccaaaagtggcagatgtgtgtatgtgtgtgtgtgtgttgtggggtagggggtgatgagggggatgccattcaggtggaggtggacaggctacccaggctcaggtgattcacacctgtcccctctctgcagcgtccagaagccatcactgctatcatcgtggtcttctccctcttggctgccttgctcctggctgtggggctggcactgttggtgcggaagcttcgggagaagcggcagacggagggcacctaccggcccagtagcgaggagcaggtgggtgcccgcgtgccaccgacccccaacctcaagttgccgccggaagagcggctcatctgaacgctggggcctgctgcagccaccaacactgcccaggactgcgggttgctggcttgtacaccgcagctgccaccgagacaccagcctctgatggctcaggaggacttgtggggagaggctgggggcacccatgtggtgggctctgtgcagcatgttgcctctgcttggctgtgcctgcagctcagggtgctggggctcgggacccacccccctgcttgcggaaccaacttttctctgtgtgtccagcaggccccacaaccccctctcctttctttcagttctcccatgcagccgaggcccgggcccctcaggactccaaggagacggtgcagggctgcctgcccatctaggtcccctctcctgcatctgtctcccttcattgctgtgtgaccttggggaaaggcagtgccctctctgggcagtcagatccacccagtgcttaatagcagggaagaaggtacttcaaagactctgcccctgaggtcaagagaggatggggctattcacttttatatatttatataaaattagtagtgagatgtaacaaaagctttattggtgtgtttgagctggtgggtgcattagctgagatggaagtgacaaatgccgagaggaattgtaaggttgccaggattctagaagaccaggaggcttcctggaattccctgctaggagccagttagagaggctgcccttggagggacagaggtgggtgggatggatttccgagcagagtgagggcaccagagaaattcaccaggaaaaaaaccagcttttttgggctcttgtggctttattgagggactggggtctctcttggacccctgattcttaaccctcaaagcacttcttaagatcagcgactctgggccggctgctgggctgggacttttgacagttgctggtgggtgtagcaggggaattcagggctcctggttcctcccgtggctggaggtgagcgcgctctgccagcagggctttgggaggccgggctctggggtcctccagagaactggggtctgaggaaggatcaaggggctgggacgtccaggctatatcaaagttgggctttgtgggggccagaatttgggggctttctggagggctgggctcagtgggtgcagtggagagccagggagtggggttttcctgggctgtagaatcttcagctgccttgtgggaaggggtgagatgaagaattaggggctctgtgagaggagagggtttggggtccccccagatgcttgggtctgcagaagctgttgaggactgggatggagacgtgacttcttggtcggactctgagggtatcagctgggacctggagtcctttgaagagctggtggcatccaaagacgaggcattttgcagggatggcagggaaaggggctggggctccggctctggtagtttcttatcgtctggttgccatcttggtatgttgggctaggtgagatggatagggaagttgtggcttttagatggcagaggggctggcaagttggatggaccattaggggaagacttggggtagggttgggggagtgggcgaggctctcaccaggctgaagcagctgtccaggtctcctctgtgacagcagtctaaactctggctcggtctcaggctgcctgcgctcttggctcccatgctaagactgtccagaatctcgctcaacaaatccagttcttctccagaccccaagaagctgctgtccagagcttcttctgcccacgggcacccctcatcctcagggctcagtgggggtgtcctgggtgaggatgggcagcctcagatatttgcccaagacccccagccctggtcaggctgctctggagtttgggaaccctcctccccatcagtcctggcctcccactttcaacactgctgttccctttttgccttaccccgcccctgggggctcggaagttccctcttccagctggcgtctcctgctggggcgaaggggccggttctgcaaagggtgggggcgataggacctcaggagactgcagaatcggggggctgaggcttgctggagaagggtgagtgtgaagtgggtgccacatatttggggagttgaagaaggaggtgagatgtctggatggggactgggatgggtagaggattcagtgataattccaggtgtgtgcatggggggaggggcgctctcacctttccaaagtgctgagtgattgggaggcgttgctgcaggcggtctgagcggctggggagggctggggccctcagagagccccccctctgcaggacagagtccccatcctaggaagagaagagtgaactgggaacctctgccacagagtctccccaccaccccctaccattggtctttagttagtctttttttttttttgtttgaaatgaagcttcactcatgttgcccaggctggagtgcagtggtgccatctcggctcactgcaacctctgactcccaggttcaagcgattctcatgcctcagcttcccaagtagctgggattacaggcgtgcgccaccatacccagctaattctgtatttttagtagagatggggtttcaccatgttggtcgggctggtctagaactcctgacctcaagtgatccaccctcctcggcctcccaaagtgctggggttacaggcgtgagccaccgtgcccagccacagtcttcttttttttgagacagggtctctctgtcacccaggctggtgtacagtggcgctatctcagcttactgcaacctccgccttctagactcaagcaatccatattcagataatttttaactatttttttgtagagacaaggcccc[132 bp omitted]tctgcacccccttcaagccactcttggcctataaaggagtggacagagaattacccaagggtggtgggatcctgggcatttgagagctcagccttctgtcccctaagatagcttttttttttgccatctgcatgtctcaaatacgttcaccaccccccatacaccacctaagaagtcaatgcaaactttcacccctttgactaatataaaatgagtattcctggaggcagtcatccccaaagaaaatggggagtggcaaagcaacagggcaaggtgttcctgtttcaaagcggtgaagaacaaaatcgcacggacaattttgagctgcaaaaattggccccaggaaacttctgagcttgggagataaaaggcagaacctggaattgtagcatccaaggacaaaaagaatgtttgccagcaaatcttggctgtcaattttaaaggggccgtgggcggggcggaggggggcgggtaggattccaacaaaaaatgagtataataaataaaaaataaaagggggaagagttgttaatggtttaactgctggttcagttctgattaaatcatttgtgtttaaagtgtctgccagggtcaaaatactccatccttgggaggtcaaagtgtcctctgtcccctccccctcgtcaccccagcaagagtggcctgtccagctcagcctcaccgagcggtacatgttcttgacggctggttgggtcttggccttgactgagtgcaggagggcgccaccacctttctgcgggagagaagataccaagggggagaggctagggccagatcccacctccccatcccaggttgtgtgatgccaatcaagcccctttccctctctgagtctccattttttcacctctataaatgaacatgatcgtagtcatgaccctacctggtgacttgcggagttaaattaatccaatgagacacacttaagtgttttgtttttgtttttgttttttttgagatggagtctcaaagaacagtttttttttgttttttttttttttttgctgagatgcagtcttgctctgttacccaggctggaatgtagtggtgccatctcggctcactgcaacctccacctccctggttcaagcgattctcctgcctcagcttcccgagtagctgggactacaggcgcctgccaccacacccggctaatttttgtatttttagtagagagagagtttcaccatgttggccaggatggtctcgatctcctgaccttgtgatccgcccgcctcagcctcaaactcctgacctcaggcaattcgcctgcctcagcctcccaaagtgctgggattacaggcatgagccaccgtgcccaggcaacaaagtggtttttgagacagggtcttgctctgtcacccaggctggagtgcagtggcatgatctcggctcactacaacctccacctcctggggctcaagccatccttccaccttagcctcccgagtagctgggactacagctacacctagcgaattttttttttttcagtagagatggggtttcgtcacgttgccctaaccggtctcaaacttctggtcgcagcaatccttctatctccacctcctaatgtgttgggattacaggcctaagccaacgcccacggcctattgttctggtggtcttacctttagattgtcggcccagagctgataggatcgaagggcccctggggtaaggagagagtgtggtggtcaccgaaggctggctgaggctgggggtgctggtggcgggtagtgggggacccaggggctggactcagggctcacctgaggaggccccgcagccagtgatctcctgctcgaattgatctgagaagccctcccccttgttgagcttctccagccgggcttcgatgaactggggtgggggacagtaaatcagaaacagcaggagacacatctgaatgccagcacttcgaagcctgcctgctgtcaagatgtagaagccatctctggcctccaacctgcccacccccaagcacctgggaaactggagcccactttattttttatttttattttttgagatggagttgctctggcacccaggctggagtgcagtggcgtgatctcggctcgctgcaacctccgcttcccgggtttaagtgattctcctgcctcagcctcccaagtagctgggattacaggcatgcaccaccatgcccagctaacttttatattgtttgtagagacagggtttccccatgttggccaggctggtttcgaactcctgacctcaggtgatccgtctgccttgggctcccaaaatgctgggattacaggcgtaagccactgtccccggcccggagcccactttagaaaccagagatcctaccttctcctccctccccgagtcaggacctgtccccagggaccaagccctgcccctttcagggacccagaaattgatttctgccccctctagaactacccacccgctctcattgaatcaagagtaggtggaccccatctttagggatcttgtggtccaagctaccttctcccaggggcctagaagtccagccctatgtgccaccccgcccccccacccatatccctaggactcaggaaatcctgggatttcacagtcaggacccatcccctctggagtccagcttggaccgccaccccagtcccagaaagacacctgcttagggacctgcgaatttggtcccaccctgatttccctcagggacctaggagtaggtcttgtcccccaggaacccaggagttgggggctcccatgtttttgttttgttttgttttgtttgagacggagtctcgctctattatccaggctggagtgcagtggtgtgatctcagctcactgcaacgtctgcctcccgggttcaaacgattctcctgcctcagcctcctgagtagctgggattataggcgcacgccaccacgcccagctaattttcgtatttttagtagagatggggtt[133 bp omitted]tcagtccttccccacttgggaaccctggagtaggggatcctgctggactgtctccagctataccctcagggacccaggagtctgccctcaaccctgccagttcagacaagccctcggggactcagcagtccacctccagtcccagctggaccctcagggctctggcatacctgtttgaacagctgcaggtgcacagcccgccggtggaaggcctgcagaggtgccccaggcttctgggccaagaagacttcctcactgaaggtcactggctggccctggaagaagcgttggagttctgagctccctggggtgctcctggccctccctcattctactatatatttatgtagcaaacattgattaggcacttgctgtgtgtctgatcctgtgtggggcctcatggatggcagggaggacttaagctgttttttgtttgtttgtttgttttgttttttgagacggagtctcgctctgtcgccaggctggaatgcagtggcgtgatctcagctcactgcaacctctgcctccagggttcaagcgattctcctgcctcagcctcttgagtagctgggactacaggcacgtgccaccatgtccagctaatttttgtatttttagtagagactgggttt[131 bp omitted]tttttttgagtcagggtctcactctgtcacccgtgctggagtgcagtggtgtgatcttggttcactgcaacctctgcctcctgagctcaagcgatcctcccacctcagcctctcaagtagctgggaccacaggtgcacgccactgcgcccagctaatttttgtagtttttgtagagacagggtctcactgtgtttcccaggctggtccaaactcctgggctcaagcaatccacacaccttggcctctcaaaagtgtgagtcaccgacccggctgatttaagcatttatctcgagtaaggtggaagcccgggaggggtgtgggcgggggggtggggggagggaaatgatctgactcgggtgttcacaggtgacctctggccactgcagggaggacagactctgggagataaagcagagggctgcttgcaggaggccgggcgcggtggatcacacctgtaatttcagcactctgggaagaggagatggatggatcacctgaggtctggagtttgagaccagcctggctaacatggtgaaaccccatctgtactaaaaatacaaaaaattagccattgtggtggtgcatgcctgtaatcccagctattcaggaggctgaggcaggagaattgcttgaacccaggaggtggaggttgcagtgagccgagattgtgccactgcactccagcctgggcaagagagcaagactctgtctcaagagaaaaaaaaaaaaaaaagaagaagaagaagactgcttgcgggggagtcccagtttttgggagagatcagtgcattaattttaggcaaacaatgagagggtccaggccagggtggagacagaggaagtgggtggtctgtgtgcagattcaggatgcagagatgacaaaaacgtcagatgctcaagtgatactagaaccccccaatgattttacagattggttgtgaaaaacaggggagggggcttcagagatcaaggccccggcttcaacattcacccactgtgggacttctccaaagccttggtttcctcatatggaaaatgggactatcacagtatccatctcaaaatgttatgagcattaaatgagataatagcagtggtaggagctagcatttattgagtgcttgctgtatgtcaggtacgattcaaagtgctgggaaaatgctgattcactgattctaatatccttttgggtggcactattggggtcccattttacagaggggcaaacagaggcacaaagtaagcactccattaatgctacctatcattattattttttaattaaaaaaatatatagagacggtggccgggcatggtggctcacacttgtaatcccagaactttaggagcctgatgcgggcagatcacctgaggtcaggagttcgagaccagcctggccaacatggagaaaccccgtttttactaaaactacaaaaattagctgggcatggtggtgcgcacctgcagtcccagctacttgggagtctgaggcaggagaatcgcttgaacccgggaggcactccagcctggggaacagagtgaaactctgtctcaaaaacaaacaaacaaacaaacaaacaaacaacaacaacaacaaacgggaggggtctcactgtgttgcccaggctggtcttgaacttctgggctcaagcaattctcccatctcggcatcccaaagtgttgggattacaggcgtgagccactgcgtccggccatctactgtacctatcgttacattgcgattcattcaggaacccacgagacctctcccgcagcgtccccgctgctcaccgggctgcagacgagtgcgtcgcggtaccccccgaagagcagggcctgggctttgaggaagagacgggacaccccttccccgggggccagggcgaccttcctgagccggagcctcagcagggacacctgaagcacaagggagtggccctgagtgggcaggtgtgggcccctcgcctcccggggcaggaaggtgggaggggcgacactgaccacgtctggaggcagcgcctgcacgtcgttaaaggtcgtctccaaggtattggcgtccacgttcagcaccacgacgtcctccagggctttttctcgtactctctgcggaaaagcggggtcggccgctcagagcccgggagtccttggcagaggagggcatctggggatgtagaggaagggggaaccctcacgtccccgtcgtctgggtagatccacgctcacctcggcgagactggcgtgcactccaatgaggtagggcatgggcgcgctgcggaccgaggggacggggtcatgcaggcaccgcccccagggcctgcccacaggccctgcccctcccagctgccctcgctcaccagcagtagtccagcaggtgtgggggcagcgtggggatcagcacgtgctcccagcgcatggggtacaggagcgcgcaggacgcgtggacgcacgaggtcagctggggagcgatggcggggcgtggagtcagggcctggaccctctagcgcgaggtctcttccagctgcatttcccacgtccccagtctcctgttccccctccccatccactgctggataatgagtgacaactcgaacccctttagaaatcatgtggagaccaggaatttggccacttacagtgctttaagcgggtgaagccaggactcataccgtcctgatccctctctgtaaggggcgcagttaataggcaacacccctgagtcttccccatgcaggtagagcaaggactgagcctccactgactccaccccgaaagaggtggagctatgacgtagaccgcccttgtcccgcccctaggggtggatccaagacgtaaccccacccaaagaggtggagccggaaggcaatcatttggccccgcccctaggggtggagccagtctccacgtctgcctttgaccctgggtttcagggtccctgggagtatgggtctctagttttttgcgccccttgttatctgagtccctgtgttcctaggtccctgggtattcgggtccctgggtcctcagatctctgagtccctgagtccctgggtccctgggtccctggattcccacgtgtataagtccctagttctcagtgtccctgagggtccggaggggtggagccagacgtgttgcggcccatagtgggtggagcctgagcacagtactcccaaaaaggaggagctgcagcgcagccccctcccacgagggcggggccagagttcaactctccaagaccttcgaaggggcggggccaggacttcgccctcgggtctcgcgcagtagggttagagccaggaatcagcccccttgtcccgccccccggggcggagccaggccctgctcccaccccggcccggcggaccccgcctcacggtgctgagtttgctggcggtgagcaggactcttctctcggccaggagcgccgcgaacagccccacgatgttctcgtcagtcacggccaccaccagctccgttaggttcctctgaggatcagagagtcgctctgggcgtggacgggcccctggatcttgcatccccggtccgggtttcgggacctgttctcacccccagagacccctccccactcacgttctcagggatggatggcaggcggccggagtccggggccacgaagcaggaaagctggtgggggtattggcagggggatcaatcagtcaggaggctggcctcacctggacccccgaccttccagggtccccgagccccgctcaccggcttgctattcccccgggtagggggggggataccctgcccgctggagaccgtcactccgctgccctggggaagaggcacgactctgtggtcatgatggctgggacgcagccttcccatccacctaaggtccagcgcccagggaatgggagctactcaccagctcaagccccactgaggcctggggcccagacagggactgctgaaacagattttgaagaagttcctctgcctcggtgacctgggtgggacgtggaggggcgggggtggctgagccagatgtggggattggggattccgagggctatgactaaggttgagtggtctgggaggagccaagggctcaggtcagtcctgggagtttttttttttctttctttaaaagaaattaataataataataataataataatagagacaaagtctccctatgttgcccaggctggtcttgaactcctgggctcaagggatcctgctgcttcggcctcccaaagggctacaattacaggcgtgagccaccgcgcccggctttttaaattttttaatttaaatttttccttgtaggccgggcgcggtggctcgcgcctgtaatcccaaccctttgggaggctgaggcatgcggatcacctgaggccaggagtccgtgtccagcctggccaacatagtgaaaacacgtctctgttaaaagtacaaaaaaaaaaaaaaaaattagccgggctggtgggccgcgcctatagtcccagctacttgggagactgaggcggaagaatcgcctgaacccggaatgcggaggttgcagtgaggcggaatcgcaccaccgcactccagcctgggcgacagaggaagactccatctaaaagaaattttttttcttgagacagggtcttgctctgtcccccaggctggagtgcagtgctgcgatcatagctcactatagcttcgaactcctgggctcagttgatcctcccaccttgctctcctgagtagctgggaccacaggtgtgcaccaccacgcctggctaattttttatttttattttttgagacggagtttcgctcctgttgcccaagctggagtgcaatggcgcgatctcggctcactgccacttccgcctcccgggttcaagcgattctcctgccgcagcctctgagcagctgggattacaggcgtgtgccacgacggccggctaattttttttttttttttttgtatttttagtagagacggggcttcaccatgt[135 bp omitted]tgttgcccagctggtctcgaactccagggctcaagggatcctcccacctcggcctcccaaaatgcagggactacaggtgtgacacagtgtgccctgccaagcctgggagatctgagagggaggggttgggaggttgaggggggtgggggctgggactcccacaggagtgagagaggggctggtctcacttggtcctgggctaggaggtctcccactgtgttcaatagcttgtaaaacacctcgaaccaaggcaggtggctgtggagagaggagacaggttccacgaagtgtccctaggcctcggcctttcccatccccccctccaacccccatatcccgcacctgaggatgcagagacagctctgggtacccgcccgcaggcggcagaaaccaaatctgcggttgccggcaaggtctgtgagggcgaaggtgaaatgctgcacggcggggctggggggctccctggagtgggaagggctgttagagagacctggacatcccagctgtctgaggatgtccccgctccccaacaaagctcctaggaccctgagtgtatgggtctctagttgtcaggatccctgaatgtctggatccctgggtctcagaatccctgggtccctgaatctctgggtccctggatctctgggtccctgagtccctgggtccctggatctctgggtttctggatctctgggtccttgaatccctaagtccctgggttcctcagtccctgagtccctgagtccctgagtccctggtccctgagtttctgagtctctgggttccgaagtccctgaatccttgtgtccctgagtccttgagtctctgagtccctgggtccctgggtccctgggttcctgagtccctagatctctgggtccctgagtgtctgagtccctggatgctaatgtatataggtccctagttctcagggcccctgagtgtctgagtctctgagtctcagggtcctcgagtgtatgggtttccagatgtctgagtctctaggtgttgagtccttggggcccctgagagatctgagtccctgagtccttggatctccccgcccttccgtacctttccacatcaaaagggaagcagaatttaggcaccatctgcatagcttcctggaggtgaagaaaagcgcagactgcttggccactgaggtcgggcaccacctccctgggctccaggtccaagaaaccaagtcccctccccctgggagactggccctcgccctgggggagcaaggagccagcctgaatacctggtccctgaagtctggagggaactgccgcaggatggggggatctgtagaagagagcacgcctctaagttcagcgacccaggcccaccctcccctcccactccctcactcccaggctcccaactcaccctcctgcagggaggcagggcaggccgcttcgaagaaccaatcaaacacagcaggggagccccctctgtgggatgcagaaggggtccagagacttgcttctatgcatgtgtggttgtgtctgccactttgcacacaagtgtggttgtgtgtgcatgtgccacaaggtgcgtcggcatgtgcatgactctgggggtttgtggctgtgagtgtgtggttgtgtgaggctgtgtgtgcagcagtgttaattgaacacacaagtacaggatggagtgagaaagtgtgactgtgtgtgtgtggctgtgtatgattgtgtgtggctgagtgcatggcttttgtgagcaggcagtgtgtgtgtgatcctgtctgctgtctgcctgaaaagatgagactgtctcctatatctgtggcatgagactgcacagatatgaaggacagcccgtgcagtcccaagctaagtgaattacatctctctctctctatatatatatccatctatctgtctgtctgtctgtctctgtctatccatccatccatccatccacccacccacccacctatccatccacccacccacctatctatctatctatctatctatctatctatctatctatctatctatctatctatttttttgagatggagttttgctttgtcacccaggctggagtacagtggcacgatcttggctcactgcaacctccaccccacaggttcaagcgattctcctgcctcagcctccctgtagctgggattacaggtgcccgccaccacgcccagctaattttcatatttttagtagagacagggtttcacatactggccaggctgttctcaaactcctgacctcaggtgatctgcccgcctcagcctcccaaattgctgggattacaggcttgagtcactgcatctagccatgccatctatattttcttgtatagatgtgagtgtgtgtgcccgagcaagtgaatgacatctatattttcctgtacagctgtgagtgtcactgggtaaccgcgtgggatccttgtgggctggctgtgtgtctctgtgtgtgagaccccatagaaccctcgtggctggtcccacatgtctcatcagagaaaggagggcaggatacctaggtacttactgtaagccctgcaatctctgctttcctcctctgcccccatatcaagcagaagaggcagccttgggctcaaggagagagacagggagatctagagggagatcagctgcacacacactgtcccgcccagttgcacacacagtccccaccatgggtaccccagcacttcaccctcacgccgacacaagtcacacacgatcacccactcataccaacacccagcctcccctctgccctgatcatccgccctgtggaccccctgaagccatcactcagacataccaaggacaaagctcagaggggtacatgcattcacagagctatagacataatcacaggagctggatagagagagagagagagagagagaggaggggaccgagagtggcctgtcccagagtgaaggtcatagcggaggcccatggagtatctgattccagccacctgccctggcaggtcactgcacctcccgggcctgctccagccccagctcccctctgccccggctcaggcctggcccgggaatcttgtaccagagaatgagggatggggtggctcttactcagctctggattccatggtccctgcagggccagcccagcggggccctctccccaggggtcctgggggcctgtgtatgctgggccccaagccggctcagcttcctgtgtggctgagagaggaagtttaacgggtgacgtccccggacagaggccctgcccccacccccgtgagaaacccaggcatcctgcctgctaattatgttggggatgggtgggcaataagtggtcagcctgggaaggcagacccccagctccgtccccgccaggctggactgtgtctggttccccccatcgtgcctgggccctcatctctccttccccgctccgcagcagccaagattcacagtctgtctattaatgaaatgcctccccgtctctttcccttggtccatttggcctggacggtcactggtggaccaccagagggagccacctgtaaagtggacggtgggggggccagggatggggacaaagagcacgaagtacaggcacagggacggacagacagacacagacacagacagttacacgctcaggaagtcatcagcacagacaaaccgagtgcagaagagccagagacgacagacatggagagatagggagtcctacagctggatcatagtcccaggccgggcacagtggctcacgcctataatcccagcactttgagaggccaaggtgggaggaccgcttgagcccaggagttcgagaccagcctgggaaacatggcgaaaccctgtgtctataaaagctacaaaaattatagctggcggtggtggcacgcacctatagtcccagcttacccaggaggctgagtcaggaggatcgcctgagcctggggagtttgaggccatagtgaaccaagattgcactactgtactccagcctgagcaacaaagtgagatcctgtctcaaaaaaaaaaaaaaacaacttagtcacagttacacacccattgtgcgcagaaagacaaggtaagcggatcacttgaggtcaggagtttgcaaccagcctggccaacatggtgaaaccctgtctctaattaaaaaaaaatacaggccaggtgcggtggctcacatctgtaatcccagcactttgggaggctgaggcaggtggatcacgaggtcaggagttcgagaccagcctggccaagatggtgaaacccagtctctactaaaaatacaaagattagccaggcacggtggtgggcatctgtaatcccagttactcaggaggctgaggcagaattatttgaacctgggaggcggagtttgcagtgagccgatatcgcgccgctgtactctagcctgggcgacagagcaggactctgtctcaaaaaatcaaaaacaaacaaacaaacaaaaaattagctgggcatggtggcatgtgcctgtaatcccagctgcttgggaggctgaagcaggagaatcacttgaatccgggaggcagaggttgcagtgagccgagatcgtgccactgcactccagcctgggtgaaagagtgagactccatctcaaaaacaaaaacaaaaacaaagcaaacaaacaaacaaacaaatgcagagacagacagagacacaataaacagttacacagagaccacagccattgatacaaacagaataacagagaaatagacccagatagatggaaacacagcacagacatagctcaagtaataaccagatatagttatagccaagacccggccacatgcagagagagacacagctggactcacatgacagccagatactcatgacagcccgacacactcaagccgtgctgcagactatgaaagacacaggggctggaggcagtggctcagtaatcccagcaccttgggaggctgaggtaggattgtttgaggccaggagttaaagatcagcctgagcaatataacaagaccccatctttacaaaaattaaaactttagccaggtgcagtagtcccagctattctgtaggctgaggcgggaggatcccttgagcccaggtggtgggggttgtagtgagctgtgatcgtgccattgcactccagcctgggcaacggtgtaagaccctatctccaaacaaacacaggaacaaacaaaaacaacaaaaaagacacaggcacacaggtggacagacgtagtcatgttgagacaggatatgtgaacatatctgcaggcacaaaaacagaacatgatatagtcagggtcacacctacacatgaaatcctgccaacagactca[131 bp omitted]agaaaccccgtctctactaaagatacaaaattagccgggtgtggtggtgacacatacttgtaatcctagctactcagggggctgaggcaggagaattgcttgaacatgggaggcggaggctgtggtgagccaagatcgtgccattgcactccagcctgggcatcaagagcaaaactccatcaaaaaaaaaaaaaagaagaagaagaagaagacacctcgtacccacagtcactggacacatacagagtcagaatcccgtcagccacatcctcacacagtctgatggacatgtgctattgtccgaatatgtgtccctccaaaattcgtatgttgaaacctaaagccccaaggcagtagtaagaggagccgagattgcgccattgcactccagcctgggcaacaagagtgaaactccgtctcaaaaaaaaaaaaaaaaaataggtgaggcctctgggaggtgatgaggtcaagaggtatccaccctcaacagtgggattaatgcctttataaaagaggcttgaggcccagtgcggtggctctggcagggtgcagtggttcacacctgtaatcctagcactctgggaggctgaggggggtggattgcttgaggcagaagtttgagaccagcctgggcagcatggtgaaaccccgtctctacaaaaaatacagaaattagctgggcatggtggtgtgcacctgtagtcccagctacttgggaggctgagtgggaggattgtttgaacccaggaggcagaggttgcagtgagtgaagattgcaccactgcactgcagcatgggcagcagagagagactctgtctcgggaaagtaaaaaataaaaaaataaaaataaataaataaataaataaaaagaggtttgagctaggtgtggtgatagcgcctgtagtcccggctacttgggaggctaaggcgggaggatcacttgagcccaggagttcaagcctacagtgaactttgattgcaccactgcattccagcgagtgacagagcaagactctatgttaaaaaaaaaaaaaattaaggctgctatgacaaaatatctgcaacctctgcctcccaggttcaagtgattctcctgactcagcttcccaagtagctgggactacagatctgtaccaccatgcgtggctatgtagctagctacttgggaggctgaggcaggagaatcgcttgaacctgggagttgtagtgagccaagatcgtgctattgtactccagcctgggtgataagagcgaaactccatccccctacccaaaaaaaaagagagatggggtcacactctgtcacccaggccgacgtgcagtggcgccatcatagctcactgtagccttgacctcctgggctcaagtgatcctcccacctcagccccctgagtagctgggactacagttgtgtgctactgtacacacaactgtttttttttttaaatttaatttaattttatttttgagacagggtctcactctgtcacccaggctggagtgcagtggcacgatcttcactcattgcaacctctgcctcctgggttcaagcgattctcctgcctcagcctcccaagtagctgggattataggcgtctgccaccgcacccagctaatttttgtatttttagtagaggtggggtttcaccatcttggccaagctggtcttggactcctgacctcgtgatccactgatccacccgcctcggcctccaaaagtactgggattacagccatgagccaccacgcccggccctttttttttttttttttttttttttgtgagacggagccttgctctgtcacccaggctggctggagtacagtggcgcaatcattgcaacctctgcctcctgggttcaagcaattctcctgcctcagcttcccgaatagctgggattacaggtgaccgccaccacgcccggctaatttttgtgtgtgtgttttagtagagatctggtttccccatgttggccaggctggtcttgaactcctgacctcaagtgatctgcccgccttggcctcccaaagtgctgggattacaggtatgagccaccgtgcctggtcagctcagctaattttaaaaaatatttttgtagagatggggtttcgctttattgcctggtctggtcttgaacttctggcctccagcaatccccaggcctcggtcttccaaagtgaatgggattacaagcacgagccacagtgcccagcctgtttttatttttattttatttatttatttattttttgagatgaagtctcactgtcgcccaggctggagtgcagtggcgtgatcttggctcactgcaagc[259 bp omitted]cctctctgtgtctcctaggctggagtgcagtggtaccattatagctcaatgccacctgtaactccttggctcaagtgatcctcccacctcagcctcttgagcaactagggttataggcacagccaccacacatcgttaatttttttgttgtttttgagacggagtttcactcttgttgcccaggctgagtgcaatggcacgatcttggctcactgcaacctccgcttcccaggttcaagcgattctcctgcctc[131 bp omitted]ctcagcctcctgaagtgctgggattacaggtgtgagccactgcgcctagcctttttatttttatttttaatttttttgagagacagggtctccatctgttgccctggctggagtgcagtggtgccatcatagctcactatagtctcgaactcctgggctcatgttatcctcccatcccagcctcccaaggagctaggactacagcaatgtgccaccacacccagctaacttattggaacaattttcatagagacagggtcttgctatgttgcctagggtggcctcaaactcctggcctcaagagatctttgtgcttcagcctcccaaagtcctgggattacaggtgtgagccacagtgcctggccgagccagtagcatttatcttcaaatctctctcacttgctgggactcctgcttttgtcctcacttcttctctgactctgatcctctgtctccctcttataaagatccttgtgattgtattggacccacccaaataatttgccataatcctgttatcttaaaatccttaactttgccaggcatggtggctgacgcctgtaatcccagcactttgggaggctgaagcctgaggatcgcctgaggccagaagttcaagaccagcctgggcaatatatcaagat[137 bp omitted]catggtgaaaccccatctctactaaaaatatggaaattagccacgtgtggtggcgcatgcctataatcccagctactcggaaggttgaggcaggagaatcgcttgaacctgggaggtggaggttgcagtgagctgagatcatgccatggcactccagcctgggcgacagagtcagactccacctcaaaaaaaaaaaaaattaaaaattagctgggtgtggtggtacacgcctgtagttccgaatcaggaggctgaggtgggaggattacttgagcccagaaggtcgaggctgcagtgaatcgtgatcacgccactgctctccaggcaatagagtgagactctgtctcaaaaacaaacacaaaaaaacctacacctggccggacgcggttgcttgctcttgtaatcccagcactttgggaggccgaggtgggtggattgcttgagctcagggatcctcccacctcagcctctgaccagcctgggtatcatggtgaaacgccatctctacagaaaagctagctggcatggtgacacatgcctgtagtcccagctacttgggaggctgaggtaggaggatcacttgagcccaggaagtcgaggctgcagtaagccatgattgtgccactgcgctccagcttgggtgacagaaggagactaaaaaaaatgttgaaccccccaaagcaactgcctcatcaaagtttggggaaatactttaaaaaaaagaaaaaaagaaagaaagaaacaaacaaaaccaggctgggtgtggtggctcacacctaatctcagcattttgggaggctaag[137 bp omitted]tgaggcaggagaatcatttgaacctgggaggtggagattgcagtgagccaagatcgcaccactgcactgcagcc[156 bp omitted]tactaaatatacaaaaaattagcctggcgtcatggcgggcgcctgtagtcccagctactcgggaggctgaggcaggagaatggcgtgaacccgggaggcggagcttgcagtgagtcgagattgcgccactgcactccagcctgggcaacagagcgagactgcatctcaaaaataaataaataaataaataattaataaactaaaaacaaaaaacaaaaaagcaaataaaaagtccgtacacttctgagtagttaagtgccttgtgcaaggaaggaggatgctgagtggggaacccaacccagatctatccattatgctgctacctaaatcctttgtattgctggtctaccacccagtgctgtgctgtgctgtgctgggcctgctgaagttgccgtgggctgatgtccacgctgcttccctcatgcctctccttactcctggctgcagggggacgtagcaagaagactgaggctccagcctgggtgcctggtgtctagcatagagtggtggacgttactgcttggctctccgcgtgtccccctctcacctacccttgcccctggctcgtcttcctaatgcagacgctgcaaaaaacccctccaacccctacatttcccagatgcctttgctgctccgtttctggatgcagaattggttctaccaatgagaaatgctcatgagagatttagaaagtggaagtgaggcagtgtgggcttgtgtgtatatcttgctgagaagcagggttgtggagctatacattttattttcatgaattcgtgttctttgttggacccatttccaggtcatagttctggtaactgcctctttgttctccacctttctccctatacaaaggagctgctccttggtgacccagctctgtggtgtcacgagggtcctacctattccggggctgctcaatctgtggtcttattcacacatctttagcatctcctgagaacttgttaaaaatgcagagtcttgagccccaccccggacctacttactgaatctgcaactgtgagggggtgagactgaagaaactgtgcgttagcaagttgttctgctgattcttttgcacggtaaaatttgagaagcctacacagcccactctctcagcgtcttccagtgattttgcaagcaccatcgattcttgtattaagttcctgtctgcttaatatacctagaatggtccccacacggaactctggctgcctgtgtcaggattctagggttcaactagcagggtttgaattccagctcactgtttagtagccatgtgaccatgggcaagtgactttgtgtggcaaattgtaatttattccttcattttttccttccttccttctttccttccttcctccctcttctctccctccctcccttccttacttccctccttcctgtcttcctgtcttcttgccttcttcttttcttccttccttccttctttccttccctcctttcttttctctctctctttcttttctttctttccttcttttttttgagacagagtctcactctgttgcccaggctgaagtgcaatggcacgatctcagctcacttcaacctctgcctcccaggttcaagtgattctcctgcctcagcctcctgagtagctgggattacagttgcgtgccaccatacccagctaattttttgtgcctttagtagagacggggtttcaccatgttggccaggctggtattgaactcctgacctcgtgatccacccgcctcagcctctcaaagtgctgggattacaggtgtgagccaccgtgcccagtacattcccctcccctccccttacttcccctcccctccccttccgttcccttccctttcttttctcccacagtgtctcactctgtcactcaggctgtcgtgcagtggtgcaattacagctcagctcactgcagccttgacctccttggcctgctgagtagctggggttacagttgtgcaccaccacagcgagttattattattattattattattatgtattttttgtagagacagggttttgccatgttgcccaagctggattcaaactcctggactcaagtaatctgcccgccttggcctcccaaaattttgggattacaggagtgagccaccgcacctggccaaaaatttgtaatttctaaagatggccatggctctattactcaccctacgtgctcttctagaatcttgccactctaccatcaagagctggagtgtgggttgggcatggtggaacatgcctgtaatcccagcattttgggaggccaaggcgggtggatcacctgaggccaggagtttgagaccagcctggtcaacatggtgaaaccccatctctactaaaaatacaaaaattagctgggtgtggtggtgggtgcctgtaatcccagctactcaggaggctgaggcaagataattgcttgagcccaggaggcggagattgcagtgaaccaagatcatgccattgtactccagcctgggcgacaagggtgaaactctaacaaaacaaaacaaaacaaaataaaagagctggaggatggaccaagtgtggtggctcatgcctgtaatcccagcactttgggaggctgaggcaggagactagcctgggtgacaaagtgagaccctatctctaatgtctactaacaatacaaaaaaattaaccagctgtggtggcatgtgcctgtagtcctagtgactctggaggctgaggtgggaggattgcttgagcccaggagtttgaggtttcaatgaaccatgatcacaccactgcactctaccctgggtgacagagtgagatcctgtctcaaaaagaaaagagctggagtctgtacttcatccccttgaatctgaacaaggcttagtgactgccttgttggtgagtcctgaataagtgacactgtatgacttctgaagttaggtcataaaaatgcaatccgtttttttttgcatttacttctgtcctgctctcttggggtgtttgctctgggggaacctggcagccatgttgtgaggaagcccaaggggactatggagagacactaaggtctttgttctccttactcctgctgagcccccagctgataattggcaccacctggccagtctgttgtgagccaccttggaagtagatccctctacctctggctaagatgctctggctgatgtcatagggagcctaaatgaactgcctcgccaatccttgctcagattacagatttgggagcaaaataaatacctgtttttgtcttaagccactaagttttgggggattgttacacagcaaaagctaactgataatgctcttctctctctaaaccttggcttggaaggggatagaagcttaggccttccagggttggtgtgaggcttgcatgaaatgaggcatgagtcatgcacacagaaaagtttcatgtgggtgagctgtgttgttactctggcaagattgccacttgggtgccagctcaggctgccatcttcctggcacccttccctagagattccccttcctgccttccatatttgcaaggtgctgcacagagaacagcagtacctctgccaccaagcacccactctgtgctcctgagatctcctcagatcctcacgaacaattctgaggtgggtgtgtcagagacgtgtgaaccagaacaactccatcttgaataggagctgggtaaaatgaggctgagacctgagacctactgggctgcattcccagatggttaaggcattctaactcacaggatgagatcggcataagatacaggtcataaagaccttgctgataaaataggttgcagtaggccgggtgcggtggctcatgcctataatcccggcactttgggaggccgaggcgggtggatcgcgaggtcaggagatcaagactatcctggctaacacggtgaaaccccgtctctactaaaaatagaaaaaattagctggatgtggtggtgggcgcctgtagtcttagctactcgggaggctgaggcaggagaatggcgtgaacccgggaggtggagcctgcagtgagccgagatcatgccactgcactccagcctgggcgacagagtgagactctgtctcaaaaacgacaacaacaacaaagcaaaacaaaacaaaacaaacaaacaaacaaacaaaaaacaggttgcagtaaggaagctggtcaaaacccaccaaaaccaagatgatgatgagtgacctctggttgtcctcactgctacactcccaccagcgccatgacagtttacagatgccacggcaatgtcaggaagtcaccctacatgttctaaaaaggggaggcatgaataatccaccccttgtctagcatatcatcaagaaaaaaccataaaaatgggcaaccagtggctctcatctgtggagtagccattctttgttttttttttttttttttttttttttgatacggagtctcgctctgtcacccaggctggagtgcagtggcgccatctcagctgactgcaacctctgcctcccaggttcaagtgattctcctgcctcagcctcccaagtagccggaactataggcgcctgccaccacgcccaggtaatttttgcatttttagtagagttggggtttcaccatgttggtcaggctggtctctcctggcctcaggtgatccacccacctcagactcccaaagtgttgggattacaggcatgagccactgcacctggctcctttatttatttatttaattattattattttttgagacggagtgtcactctgttgccaggctggtgtgcagtggcgttatcttggctcactgcaacctctgcctcccaggttcaagcgattctcctgcctcagcctccggagtacctgggactacaggcgcccaccaccacgccctgcgaatttttttatttttagtagagatgggatttcgccatgttgaccaggctggtctctcctggcctcaggtgatccacctgcctcagcctcccaatgttgggattacaggtgtgagccaccgtgccctacccctttactttcttaataaacgtgcttttactttatggacttgccctgaattctttcttgagatccaagaaccctctcttggggtctggattgggaccccattcctataacagttgtggggggatcctgggggaaaacatacgatcccattttacaggtgggaagaccgaggctgagagaaggcaaatggcttagtcaaaacctcagggttagtgggtggcctagcctggcccgtctgatccctccccagcacgccccccatccagagatgagatgtcatcggtaccctcctccatcctgtagagaaaagcccgcacttgctgtaagagaggaaagagggattcggcagaaacatccatgacaacaattaatttatttattgagggtgaggcagggaagcggggagggagggtaggggtgacctctcttcctcacaggcaccaggccttgtttctctcccagataagctaaggtcggcaggggctgaggggagtgaggcagggaggatgcatggggcctgtgggaatcagagagaagctggggtcagaggtaggagctgacgctgtggggggtggggggtgaaaggtgaggcaaggtcaaaggtgaactgcagctcggagggaggggtccaatataaaccaggacttgcaggtgtagaagtaaaatgggactcatagagggtgaaagagaagttggagtcagaggggattcagagatcaaagagaagttggggtcagaggtaggagctggggctcaggtggggggttaaaggtgaggcaaggtcagcggtgaagtgcagctcagagggaggggtcaaacataaaccagaacttataggtctagaggtaaaatgggattcatggggggcagaggtcaaaggtgaagcagaagtcaggggtgaaggaaggtctgcaaagttaaaggtgcggtttccagagtcagaaggggtgaagcggggctcctcctgggaatgtcaaggttggaagagctcaagggggttaaagataaattagggctcaaaggggagccagggtcggagatgaagtagccagaggtaaagcgagctccaaaggtattgttagggtcagcggggagtcagccttggagggaaagcggggctctagggttcagagatggggggcctagcggatcaaaggtcagaagcctcgaggggacaggtgggaagcgatgggagcagcctaggccacctcctcctccgcctcctcctcgaactcgccctcctcggccgtggcgtcctggtactgctggtactcagataccaggtcattcatgttgctctcggcctcggtgaactccatctcgtccatgccctcgcccgtgtaccagtgcaagaaggccttgcgccggaacatggccgtgaactgctcggagatgcgcttgaacagctcctggatggccgtgctgttgccgatgaaggtcgcggccatcttcaggccgcggggcgggatgtcgcacacggccgtcttcacgttgttggggatccactccacgaagtagctgctgttcttgctctgcacgctcagcatctgctcgtccacctccttcatggacatgcggccccggaacacggcggccacggtcaggtagcggccgtggcgcgggtcgcacgccgccatcatgttcttggcatcgaacatctgctgggtgagctcgggcaccgtcagggcccggtactgctggctgccccggctggtcaggggtgcgaagccgggcatgaagaagtgcaggcgaggaaagggaaccatgttgacggccagcttgcgcaggtcggcgttcagctggcccgggaagcgcaggcaggtggtgaccccgctcatggtggccgacaccaggtggttgaggtccccgtaggtgggggtggtcagcttgagggtgcggaaacagatgtcgtagagtgcctcgttgtcgatgcagtaggtctcatccgtattctccaccagctggtgcacagacagcgtggcgttgtagggctccaccaccgtgtctgacactttgggcgagggcaccacgctgaaggtgttcatgatgcggtctgggaactcctcgcggatcttactgatgagcagcgtgcccattccggaccccgtgccaccccccagcgagtgggtcagctggaagccctgaaggcagtcgcagctctcggcctccttccggactacgtccaggacagcgtccaccagctctgcgccctccgtgtagtgcccctttgcccagttgttgccggctccggattggcctagagagggaaggggaggggacacacatgcagttatggggagccccaacccttgactctgtctctccaccacctggagggcctctagtagttgaat[174 bp omitted]tggtggcgggcgcctgtagtcctagctactcgggaggctgaggcaggagaatggcgtgaacccaggaggcggaacttgcagtgagccgacattgtgccactgcactgcagcctgggcaacagagcgagactccgtctcaaaataataataataataataataataaataataacaattatagccaggtgtgctggtgagcgatcgtagtccctggctactcgggaggctgaggcaagagaattgcttgaacctgggaggaggaggctgcaggtagccaagattgagccactgcattccagcctgggtgacggagtgagactccatctcaaaaacacacatacacacaaaacactcccccgccccctgcctaaaaaaaaaccaagactgggcacagtggctcatgcctgtaatcctaacactttgggaggcagaggtgggaggattgcttgagcccagcagttcaagactagcctgggcaacctagtgaggccatgtctctacaaaaaaaaaaaaaaaaaaaaaaaaaaaaaaatatatatatatatatatatatatatatatatatatatataaattagccagtcatggtggtggcacacctgtagtaccagttactaggggggctcaggtgggagattgcttgagcccaggagttggaggctgcagtgagctatgatcacaccattgcagcctgggagacagagcaagaccctgtctctaaaacaaataaataataacaataaaaagattaatatttaacatcattattaataataatatcattttcaggcagggtcttggtatgttgcccaggctggagtacagaggtgcaatcatggctcactgcagccttgacttcccaggttcaagtgatcctcctgccccagccttttgagtagctgggactacaggcttatgctaccagatctggctaatttttgtatcttttttttgtagaggtggggtttcgacatgttgcccaggctgttcttgaactcctgagctggagcaatccacctgccatggcctcctaaagtgctgggattacaggcgtgagccaccatgcttggcctgtgttttcttgttaatcatgtttattgtctgcaagctcactgtggaatgcaagctcccggaggaaaagaatcagtattagaatattggccaggcgcagtggctcatgcctgtaatccagcacttagggaggccgaggcgggcagattgcgaggttaggagatcgagaccatcctggctaacacagtgaaaccctgtctctactgaaaatacaaaaaattagccgggcgaggtggcgggcgcctgtagtcccagctactcgggaggctgagcctgcagtgagccgagatcgtgccactgcactccagcctgggcgacagcaagactccgtctcaaaaaaaaaaaaaaaaaaaaagaagaatattggccaggcgtggtggctcacgcttgtaaacccagcactttgggaggccgaggcgggcggatagcgaggtcaggagatcaagactatcccggctaacacggtgaaaccccgtctctactaaaaatagaaaaaattagctggatgtggtggtgggtgcctgtagtctcagctactcgggaggc[136 bp omitted]gccggtattactgtgaacagctaacgttttctttcacccctcatctgtctccaccttagttcagctccagcatcaccctcctggataagttcaattccctctgtcctggtcccctggctcctacccttatcacccagtctgtcctctccacagtacccacgagaggacacctgagagcaagtaagtcaggtcccgtccctcctctgcctacagccctccatggctcccacctaccttggggtcaaagcccaaatcctccctgcaggccacaaggccctgccggacctgccccatcccctccctcactctgcttcagccgcagctgttactccagctttccaggtgtggtcctgccctggggcctttgcactagtggcttggctgcttagaatgctttccccccaggtattcacctgactttttcctcacttccttcaggtctcagctcaatgccacatcctcagagaagccacctctggtcaccccctccctcctcctcccgagcctggtggtttagactgcagattctcgggactgacaagacaaactgtgtgaccttggacaagtgacttcccctttctgatctgttggaagatttcaaaacataatgatgcagttttgtggccgtggcccatcataggtccttgggaaatggctgggtgaaatcaagatgaaatgagattggccaaatggtgtgagtgatttcaggaggaccagagggcttacagttgggccaagagattctatggcctctgggtggccagggggtgggaggagcattaaaagtgtgggctcagaccaggcgcggttgctcatgcctgtaatcccagcactttgggaagcagaggcaggcagatcacctgagaggtcaggaataggagaccagcctggccaacatggcgaaaccccgtcactattaaaaatacaaaaaattagctaggtgtggtgatgcatgcctgtagtcccagctactcgtgaggcaggagaatcgcttgaatctgggaggtggaggttgcgtcactgcactccagcctgggcaacggagactccgtctcaaaaaaaaaaaaaagcgtggacctagtagtcagaccctctcctctggctcctgacagccccagtggcttgcagtgtgactttctgcaagtgacctaacgtctctgtgcctctgttttctcacctgtaaaatggaagtaagaggcgagttgcggaaaagattcagagaggcaggacaggtcctgcatttagcacgtcttacatgctgggagtattggaggcgggtggagccagggtggggacatgcagccagctggagccaggaaagctttcccggaaggattgtcccagggtgtggacaccccactatcttcacatatgctgttgcctccgtcttaaacatctttcctcccttccatgccctttggccagtccaaatcctactcacattctagactgcagatagtaatgaaaacaacgacaaatgcttatttacctctttctctgtgtcaggcattgttctaaactctacacatattcatgactttaagcttcacaatttttttttttttttggagacgaagtttcactcttgttgcccacgctggggtgcagtgtcatgatcttggctcaccacaacctctgccgttcaagcaattctcttgcctcagcctcccgagtagctgggattacaggcatgtgccaccatgcctggctaattttttatttttagtaga[143 bp omitted]aatccctgttttatttgatcttttttagagatggggtctcacaccatcgctcaggctggagtgcagtggcaccatcatagctcatggcagcctcaacctcccaggctcaagtgattctcctaccttagcctcacgagtagctgtgactacaggtgcacaccacctcactcagctaattaaaatttttttctttttgtagagacagggtctcaccatggtgcccaggctggtctcgaactcctgacctcaagctctcttcctgactcagcctcccaaagtcctgggtttataggcatgaaccaccatgcccagtgaaatccctgttttaaagacgaggaggccgggcaaggtggctcatgcttgtaatccagcactttgggagctgagttgggtggatcgtttgagtcccggagtttgagaccagcatgggcaacatagagagacccacctctctacaaagaaaactaaaaaattagctgggtgtggtggtgcatgcctgtaggtccagctacttgggagactgaggcaagaggatcacgtgtgcccagaggtggaggtgacagtgagccgtgatcatgccactgcactctagcctgggtgacagcaggacagacagaccctgtctgaaaaaaaaaaaaaaaagaggatttttgaggcccagaaaggctgaggagcccatcctaagttatccatctgaatcaacccctggcagagctttacttatttatctcctttgtggcctatcaccttctaccagaatgggagctgcactggggcagagagggagctccggctgtttgattcttacctggatctccagcttctagaacagggcctggtatgcagtgagtgctcactgtttgttgaatgcatgaagtggcagaattgggatgtgcacccaggcagtctggttccggttcagaccgttgaattaaaatgccacctcctccaggaagacttccctgaatccttctctgtatccgccctcctcagggctctcacagtggcctgagcatcccctcatcacagccctggatgcagggctggtgcctggtgccctgtccaccccatctctggtctgtgggccccggtggtggctgttgactctgtggtgttagcaggaataaggaggttttccagcctctggctccctgctgggggactcaccaaacacgaagttgtccggccgaaagatctgaccgaaggggccagaacggacagagtccatggtgccgggttccaggtccaccagcaccgctctggggacataatttcctcctgcagggaaacagatggagggcagttcgatgcgtgccaggaaccacaggcgcccggtagcatcctgttccctcccagctgccccttcccacctggaaggtgcctccttcgccctacctgtggcctcgttgtagtacacgttgatcctctccagttgcaggtcactgtccccatggtatgtgcctgtggggtcgatgccatgttcgtcactgataacctcccaaaactagagagagaggtggtcggaagagttgagagaggggaagccggtggccaagccgaggactgcccccagcccccaactagctccctagctgccacctctcccccagcaaggtgaacgggggacctagaggcatggtgtcggggcgaggatgaggcagcaagaaggagcggtgggggcggggtgcagccgagtcagcacccagcggggccggctggtgccagcgcacccaggctgcagcccgggggaggcaccggggctctttgtgcgtgaggaggggacagtggcccagctgtgggcccagctgtgacaggcggacagaaggctggctcccactctccgcagcctctttgttcccagtctggccctgccacccccaccccgcgacccttcccccaaggcccctggggcgcgctggcctcctggggacctcattcctttccaaagactcccaggttgcggggtgctccggggaccgaccccgcggtgctccccggggccgccactgcctccccgggccccgttccccgagcaccttggccccgatctggttgccgcactggccggcctgcaggtgcacgatctcccgcatggcggtggcgctgagggtggacgcggcggcggtggcacgagcgcggggagctgcggcggcggcgagggtggaagatgcggcggagacggcggagcacggtccctgcgcccccgggagccgctatatgagcgggcggggcacgcgtcacggccggtcaccctcccgctccgccccttggtcccgccccgggatgatggagggggctggggtggggggaggtggtgcagggacctccctccccagggggcctcccagagaagtccgggacgccacgtgctccgacccctgccttgggggtgaggccccttagggagccaccagtgcagtctcccccgtcccagcccccagccaggcttggccacccgcagaaattgggcggaggaagggaggggagcgcctggtaaacaggcatctgagaagtcctgcccctcccccttagcctccaccctcccgccccaggccttgcctcagtttctcggtccgcagccccccttctcattctatttagacctcattcgccagaatccttgcagtaaccgcgagccctcccagtgggctgggggctccggagcggcgatctggtttgcgggtggggggcggtaggttcctggagggcttgtcctgaagctgcatagtaaaaccacgattttcctcccatgattgggtgcagatgctggtgggctcccctggtacacctctactgggcattgagctcgtcccaggtggggtcacccccagcctggcctaaggaggagagtggaggagtaagacagctgggttcatattgggagggggacagtgagtccccagggctgcctcgctttcccaaaataacacccctcctctccagtattgtaatttatctttatctatatctatacccttttttttttttttttgagacagagtttcgctcttggcgcccaggctggagtgcaatggcccaatctcggctcactacaacctcagcctcccaggtccaagcgattctcctgcctcagcctcccgagtagctgggattacaggcatgtgccaccacgcccggctaatttttttgtatttttagtagagacaaagtttctccatg[135 bp omitted]ctcaggctgtagtgcagtggcatgctcatagctcactgcagcctcaatgtcctgggctcaagcaatcctctcacctcagcctcccaagtagctgggactgcaggtgcatgccatcacgcctggctaattttcaagattttttgtagagatggggtctcgctatgttgtccaggctgctctccaactcctgagctcaagagatcctcctgcctcagcctcccaaagtgctgggattccaggcatgagccactgcgcccagctcagtattataatttattacccaccatctcccttgcctctgcatttcctgtagcattaggtgtatgaccttgccctggtgctcctctctgtgtctgaatttcacatttgcaagttggggtggtgaggaaggcccaccctccagggtctgattatgcgatgacccagttaacaaggtggcgatagtctcccctcctgcagagtcaacaataaattgtatctttctcgagtctaagtattatcagaggctggactggacttcctgtgctgcccctcatgtgaaggtcaagcctcctggggctgcttccttggacagcctccagtcccgccctcccaggaagtctcctcctcgcctcccatccttgactttcccactcaaggactttggtgtattgctggtgggaggtggggtaagccatcttggccatgtggttgggacctcacatttgccatggccactaattttttttttttttttttttttttgacagagtcttgctctgtcacccaggctggagtgcagtggtgccatctcggctcactgcaacctctgcctcctgggttcaagccattctcctggctcagccgccccagtagctgagattacaggtacgtaccaccatgaccagctaatttttgtatttttagtagagacgggctttcaccatgttagccaggctggtctcgaactcctgacctcgtgacctgcccaccttggcctcccaaagtgctgggattacaggcgcgagccaccgcgcccagcaaattctttttttttaatttcttgccctgtcatccaggctggggtgcagtggcatggccatggctcactgcagcctcgaactcctgggctcaagtgattctcccacctcagcctcccgagtagctgggactacaggcatgcaccaatatgcctgggtaatttttgtatttttttgtggagatgggggtcttgctatgttgcccaggctggtctccaacgcctgagctcaagcaatcctcccacctcagcctcccaaagtgctgggtttacacatgtgagccatcgtgccctgcccaatgaccactaaatttgaccagtggctctcaacagcgtgtgtgtgagagtgtgtgtgtgtgtgtgtgtgtgtgtgtgtgtgtgtcgggggggcgggggagcggtgatattgccttcccagggaacacttggcaatatctgaagacatttttggttgtcgtacccagatgggggcggggatgtgtgtgtgagactatgtgtgcactactggcatctagtgggtggaggccagagatgctgctgaaagcccttcagtgcacaggacggccccaccccagagaatgatgcaggcccaatgtcaacagggttgaggctgagaaatcctgtgttaattattttgggaaaaaatttgtgttagccccttcgctcacactagatgccagaataaattccagaggggctagaccttatatgggtttggtggggcgatcccttagcttctgtgacttatatactctctctccctcaactcagttagtatgtgtgtatgtatgtttttatctttttagcaagctatttttttttttgagatggagtttcgctcttcttgcccaggctggagtgcagtggtgcaatctctgctcatctcaacctccgcctcttgggttcaagcgattctcctgcctcggcctcccgagtagctgggattacaggcatgcactgccacgcccggctaattttgtatttttagtagagacagggtttctccatgttggtcaggctggtcttgaactcccgacctcaggtgattcccctcaccttggcctcccaaagtgctgagattacaggcgtgagccactgcacccggccgccatttttttttttttttttgagacagtttcaccctgttgcacaggctggagtacagtggtgtgatcatatctcactgcagccttgacctcccaggctctggtgatcctcccacgtcagcctcctgagtagctgggactacaggtgggcaccaccaggcctggctaatttttgcattttttgtagagacagggtctcgctatgttgcccaggctggtctcaaactcctgggctcaagtggtcctccttcctgtcaggcctctgagcccaagctaagccattgtaacccctatgacctgctcgtatacatccagatggcctgaagcaactgaagatccacaaaaaaagtgaaaatagccttaactgatgacattccaccattgtgatttgttgcggccccaccctaactgatcaatgtactttgtaatctcccccacccttaagaaggttctttgtaattctccccactctcaagaatgtactttgtgagatccacccctgcccccaacacattgctcctaactccaccgcctctcccaaaacctataagaaccaatgataatcccaccaccctttgctgactcctttttcccactcagcccgcctgcacccaggtgaaataaacagccttgttgctcacacaaagcctgtttggtggcctcttcacacggacacgtgagacactgccttggccttccaaggtgctgggattataggtgtgagccactgcgcctggccagcaaatgattttttatttactcgcatagtatagctccaataggaaagtaatttggcttagcactctttacagctccagcacaatcttgaaggcatcc[187 bp omitted]gggtgtggtggtgggcgcctgtagtcccagctactcaggaggctgagg[131 bp omitted]tccccacctatacttcttttttttttggagacggagttttgctcttgtcgtccaggctggagtgcagtggcacgatctcaactcactgcaacctctaactccggggttcaagtgattctcctgcctcagcctcctgagtagctgagattacaggtgtgcaccaccaccctcagcaaatttttgtattattggtagggacagggtttcaccatgttggccaggctgatcgcaagctcctgacctcaggtgatccactcgcctcggcctcccaaagtgttgggattacaggcgtgagccaccacgcctggcccctatgcttcttttttcttttttatttttttgagacggagtttcgctcttgttgcccaggctggagtgtaatggtgcgatctccggctcaccgcaacctctgcctcccaggttcaagggattctcttgcctcagcctcctgagtagctgggattacaggcatgtgccaacacacctggctaattttgtatttttagtagagacggggtttctccatgttggtcagggtggtctcgaactcccaacctcaggtgatccactagcctcagcctcccagagtgctgggatttcaggcgtgagccaccgcacccggccgcggcccctgtgcttcttatcttgctcacgaatatctgaaagtttgaagattcttccagctttaaaagcagttatgtgggctgggcgtggtggctcatgcctgtaatcccagcactttgggaggttgaggcaggtagatcactgaagaccaggtgtttaaggctgccctggccaacatggcgaaacccctgtctttactaaaaatacaaaaagtagctgggcatgatggtgcgcacacttgcagtcccagctactcaggaggctgaggcatgagaatcacttgaacccagaaggcagaggttacagtgagctgagattgtaccactgcactccagcctgggtgacagagagaccctctctccaaaaagaaaaaaaaaaattgatctctctttctgaggtccataaaaccaggaaaaggcctgcctccttgttggtgtgatctgcctgtcatctggggctggggcaacgtttccaccctctctgtgagcctcgagaaattgttgacatacaccccagctcctcatcctccccgaggggacagagagggcccactctgcctattattaataataatagtgctgtgtagaccagatctatggccagatcttgttttcaagtgcttgctgtgtcagcttgtgtgtgtgtgtgtgtgtatatatatgtgtgtgtgtatatatatatgtgtgtatatatatatgtgtgtgtatatatatataattatttttttaggtggagtctcactctgtctcccaggctgcagtgcagtggccctatctcagcttattgcaacctccaccttggcctcccagtgctgggattacaggcatgagccactgcacctggccttgtttatattttacttatttatttactttttgagacagagtctcactgtgtcacccaggctggagtgcagtggcctgatctcggctcatcacaacctccacctcccgggttcaagtggttctcctgcctcagcctcctgagtagctggaactacaggcgcccaccaccacgcccggctaatttttgtattcttagtagagatggggcttcgccatgttggccaggctggtctgccaatgtgctgggattacaagcgtgagccatggcacctggccagcttgtttatatttttagctgatgaaaccacaacctaggaggtagttgctgttctatgcctattctacagatgagaaaatggaggcctaaggaagttgagtatctcacctgactgtcccatactgttgaggctgggaatagagtcaaaagagccccgcattccaggtccaaagaccctgctctttatcgctacaggatgttggagttactttgttatttgactttttttgttttgttttttgttttgaggcagagtcttgctctgtcacccaggctggagtgcagtggcatgatcttggctcactacaacctctgcctctgggttcaagtgattctcctgcctcagcctcctgagtacctgggattacagatgcacactaccacacccggctcatttttgtacttttagtagagacggggtttcaccatgttggccatcacaccaggctagtctcaaactcctcacctcaggtgatctgcccaccttggcctcccaaattactgggattacagacgtgagccaccatgcccatccagttatttgatcttaaaaaaaaaaaagaggcggggtacagtggctcatgcctgtaatccaagcacttcgggaggccaaggtacgtggattgcttgagcccaggagtttgagaccagcctgcccaacatggtgaaaccccgtctgtactgaaaatacaagaattagccgggcatgatggcaggtgcctgtaatcctagctactagggaggctgaggcaggagaattgctttaacccgtgaggcggaggttgcagtgagctgagattgcgccactgcactccagtctgggtgtcagagcgagactctgtgtcaaaagaaaaaaaaaacaaaaaaacccaaaaggctggcaatccagtgagttgtctttcaggaggaaaatgttgctggtgttgaggcagccgtgtgactgtcacgtgctccgtggcctgggcctctccgtgtcatgtgtctgcccaccacggtgcccggtgttcccggctggctctgatgtgtgctgtcagcttccagcatcggaatgtatgctgtctttgtgtacttggcctgtgggtcactggcccttttcccaaggtccttgccaccccttctccccggcccctccttccacctccccacccagacggtagagtctgatttccttttcctctgccagggtggagcccagccctgggcattgacacagccagcatgggccctctccagctagaggcagcgggagacagagggttggaacggttactgttctgagacagggatgctgaatgagtcttaagagaagccctcccaactccagggacacacacaagctctgtggaagccgtgcctggcactgttgggaccaattatggggtggggggtgctggaaggggtggggagggggacaatggagcattctctggccttgctgggcctactgccaccagataccccatgcagtacatcccgaagaaggcatgttcagaatagaaggatttcctagtggctcacacgggtaatcactttaagaggccaagcagggaagatcgcttgaggccaggagttcaagaccagcctgggcaacaaagtgagactctgtccctaatttaaaataattaagtaaataaactagaaggatttcctgagccaggtgtgttggcttatgtctgtaatcccagcactttgggagactgaggcaggaggatcacttgaggccaggaattcaagaccagcctgggcaacaaagccagataccatctctattaaaacaaacaaacaaacaaacaacaacaacaaaaaaaaaaccataaaaaaatagggccaggtgccgtggctcacacctgtaatcccagcactttgggagggcgaagtgggcggatcacctgaggtcaggagttcgagaccagcttggccaacacagtgaaaccccgtctctactaaaaatgcaaaaaattagctgggcatggtggcaggcacctgtagtcccaggtacttgggaggctgaggcttgagaatcacttggacctgggcaggggaagttgtagtgagccaagattgcaccactgcactccagcttgggagacagagcaagactccatctcaaaagaaaaagaaaaagaaaagaaataataatagaaggatttcctgggagatggggagggaggagtgttgacatcagctagggctggggctggaatggggaggggacactttctgaactcctcttccctacccaccccattgcctagcagtgaggacctcgtctgggcacccggtgcaggtgtagctggtgtgcagttgctctcacagtttaaggaggccggatgtggcaggcacatggtcagaaagtggggctgcaggctatccatggtcatcttggagattctggtcagggaggagctgaccatgtcaccagagatgaaggtgccccgctgctcgtaaaccatgaccctgtagattttaccgttgaaggccagcaagctcggctgcaggttctgattgtgaaagaaaaatcaatcttggggctcctaaatcactaaactaaaggaaaaagtcaagctggcaactgcttagggcaaacctgcctcccattctattcaaagtcacccctctggccaggcagcgtggtggctcatgcctataatcccagcactttgggaggctgaggctggtggttagccgggcctggtggtgcatgcctgtaatctcagctacttgggaggctgaggcaggagaatcacttgaacccgggtggtggaggttgcagtgagccaagatcatgccattacactccagcctgggtgacaagagggaaagtccctctcaaaaaacaaaaaacaagggccgggcgcggtggctcatgcctataatcctagcactttgggaggc[136 bp omitted]gaggcaagagaatggcgtgaacccagaaggcggagcttgcagtgagcagagatcacgccactgcactccagcctgggctacagagtaagactccgtctcaaaaaaaaaaaaaaaaaccccacaaaaaacaaaaaacaacaagaacaaagtccccacctgctcactgagatacctgcatatctgattggcctctttggagaggctaatcagaaactcaaaagaattcaagcatttgtctcttatctacctatgacctggaagacccttccctgtttccagttgtccctcctttccagaccgaaccaatgttcatcttgcatatgttgatctcatgtctccctaaaatgtataaaaccaagctgtgctctgaccacccttgggcacatgtcatcaggatctcctgagactgtgtcacatatacgtgt[136 bp omitted]catggcgaaacctcatctctactaaaaatacaaaaattagccaggtgtggtggcacatgcctgtaatcccatctactcaggaggctgaggcaggagaattgcttgaattcaagaggcggaggttgcagtgagctgagatcgcaccactgcactctagcctggggaatagagtgagactccgtctcaaaaaaaaaagaaaagtaaaaaataaaaaactaaattcactgagacccgcctctgatatttggggttcacatggacatgaatcatctctcccaggctgatctgcagggctctgtaactgcccagtgggttcactttgtcccctgcccagatagaatggatgtatcaagacaggagaattgcaacaaagagtttaattcatgcagagctggatgaacgggagactggagttttattttaattaattaattaattaatgtatttatccatctatcttgagttaagttcttgctctgttgcccaggctggagtgcagtggcaggatgataagttactgcagactccaactccctggctcaagtgatcctcccacctcagcctcctaggtagcgtgtgtggcttatgtctgtggtcccgctactctggaggctgaggcatgagaatcacttgaacccaggaggtggaggttgcagcgagccgagattgtgctactgcactccagcctgagtgagactcctt[141 bp omitted]aaaccccctctctactaaaaataaaaatacaaaaaaaaaaaaaaaattagccgggcatggcggcatgcgcctgtagtcccagctgctggggaggccgaggcaggagaatggcatgaacccgggaggc
